(19) United States
(12) Patent Application Publication
(10) Pub. No.: US 2008/0020373 A1
(43) Pub. Date: Jan. 24, 2008

(54) Composition for Detecting the Response of Rectal Adenocarcinomas to Radiochemotherapy

(75) Inventors: Thomas Ried, Bethesda, MD (US); Michael J. Difilippantonio, Rockville, MD (US); Bijan-Michael Ghadimi, Bethesda, MD (US); Marian Grade, Goettingen (DE); Heinz Becker, Gottingen (DE); Torsten Liersch, Gottengen (DE)

Correspondence Address: NATIONAL INSTITUTES OF HEALTH;C/O VENABLE LLP, P. O. BOX 34385, WASHINGTON, DC, 20043-9998, US

(73) Assignee: The Gov.of US as represented by Sec.Dept.of Health, Bethesda, MD (US)

(21) Appl. No.: 10/585,725

(22) PCT Filed: Jan. 12, 2005
(86) PCT No.: PCT/US05/00891

§ 371 Date: Jul. 12, 2006

Related U.S. Application Data
(60) Provisional application No. 60/535,491, filed on Jan. 12, 2004.

(51) Int. Cl. C12Q 1/68; C07H 21/04; C07K 16/00

(52) U.S. Cl. 435/6; 530/350; 530/387.1; 536/23.5

(57) ABSTRACT

A cDNA array (9984 genes) was used for expression profiling in rectal adenocarcinoma. The expression data were correlated to responsiveness to chemotherapy followed by radiotherapy. A set of 54 genes was found that were differentially expressed in responders vs. non-responders. The genes may be used as prognostic markers for determining whether a rectal adenocarcinoma is responsive to radiochemotherapy.

[0001] This application claims the benefit of the filing date of U.S. Provisional Application Ser. No. 60/535,491, filed Jan. 12, 2004, whose disclosure is entirely incorporated by reference herein.

### FIELD OF THE INVENTION

[0002] The present invention relates, e.g., to a composition comprising a plurality of nucleic acid probes for use in research and diagnostic applications.

### BACKGROUND INFORMATION

[0003] Rectal adenocarcinomas are among the most frequent malignant tumors in the Western World. Surgery, including total mesorectal resection, is the primary treatment for rectal carcinomas. In locally advanced stages of this disease, radiation or combined radiochemotherapy is mandatory. Whether radiochemotherapy should be administered prior to surgery (neoadjuvant) or after resection of the primary tumor (adjuvant), however, is still a matter of controversy (Sauer R. (2002) Pathol Oncol Res 8, 7-17; Pahlman et al. (1998) Eur J Cancer 34, 438-48; Nelson et al. (2001) N Engl J Med 345, 690-2). The decision to administer neoadjuvant radiochemotherapy relies primarily on the depth of tumor infiltration, which, in specialized centers is determined pre-therapeutically by rectal ultrasound (Liersch et al. (2003) Chirurg 74, 224-34; Hunerbein et al. Ann Surg (1997) 225, 432-8; Adams et al. (1999) Dis Colon Rectum 42, 159-66; Glaser et al. (1990) Br J Surg 77, 883-7). Neoadjuvant regimens might be particularly attractive (i) because a priori not curatively resectable tumors can be down-sized to achieve the undisputed benefit of tumor cell free surgical margins (R0-resection), (ii) because preoperative treatment reduces tumor burden and, therefore, might increase the possibility for sphincter preservation, and (iii) because radiochemotherapy cannot be applied when postoperative clinical complications occur.

[0004] However, the response of individual tumors to radiochemotherapy is not uniform. This poses a considerable clinical dilemma because patients with a priori resistant tumors could be spared exposure to radiation and DNA-damaging drugs, treatments that are associated with substantial side effects. In such cases surgery could be scheduled without delay. Alternatively, different neoadjuvant treatment modalities including additional chemotherapeutics could be pursued. It would therefore be of significant clinical relevance to identify predictive markers of cancer response to neoadjuvant radiochemotherapy.

[0005] Accordingly, numerous groups have employed targeted approaches to correlate expression levels of candidate genes in response to radiation, different chemotherapeutic drugs, and combinations of radiation and chemotherapy (for review see Pasche et al. (2002) Best Pract Res Clin Gastroenterol 16, 331-45; Adlard et al. (2002) Lancet Oncol 3, 75-82). The selections of candidate genes primarily included genes required for drug metabolism, drug activation, drug resistance, and DNA damage repair, and oncogenes and tumor suppressor genes involved in cell cycle control. Unfortunately, these candidate gene approaches have not materialized into sound pre-therapeutic predictors of response to radiochemotherapy. See, e.g., Okonkwo et al. (2001) Oncol Rep 8, 497-500; Saw et al (2003) Dis Colon Rectum 46, 192-202; Spitz et al. (1997) Clin Cancer Res 3, 1685-90; Luna-Perez et al. (1998) Ann Surg Oncol 5, 203-8; Elsaleh et al. (2000) Radiother Oncol 56, 239-44; Diez et al (2003) Oncology 64, 213-9; Scott et al. (1998) Eur J Surg Oncol 24, 169-73. There remains a need to establish reliable, clinically useful, predictors of radiochemosensitivity of rectal adenocarcinomas.

[0006] Parallel profiling of global gene expression levels based on microarray technologies has emerged as a powerful tool to monitor the transcriptome of cancer cells for tumor classification and prognosis (Rosenwald et al. (2002) N Engl J Med 346, 1937-47; van't Veer et al. (2002) Nature 415, 530-6; Iizuka et al. (2003) Lancet 361, 923-9; Bertucci et al. (2001) Lancet Oncol 2, 674-82; Yeoh et al. (2002) Cancer Cell 1, 133-43). In addition, the power of gene expression profiling as a predictor of drug response has been explored in several model systems, including the NCI-60 cancer cell line panel (Staunton et al. (2001) Proc Natl Acad Sci USA 98, 10787-92; Scherf et al. (2000) Nat Genet 24, 236-44) and tumor xenografts (Zembutsu et al. (2002) Cancer Res 62, 518-27). The results of these studies provide evidence that at least for some tumors and a subset of drugs, pre-therapeutic gene expression profiles might predict treatment response.

[0007] The present inventors have analyzed gene expression profiles of rectal adenocarcinomas, and have identified genes whose expression is correlated with responsiveness of the tumors to radiochemotherapy (e.g., neoadjuvant radiochemotherapy). Combinations comprising probes specific for these genes can be used in, e.g., diagnostic and experimental methods.

### BRIEF DESCRIPTION OF THE DRAWINGS

[0008] FIG. 1 is a pictorial presentation of specimen accrual, clinical diagnosis, and experimental design. cUICC refers to pre-therapeutic clinical staging of tumors based on rectal ultrasound and computed tomography. ypUICC refers to histological assessment of the resected specimen after neoadjuvant therapy.

[0009] FIG. 2 shows a hierarchical cluster analysis of 23 patients based on the 54 most significantly changed genes (p<0.001) when using T-level-down-sizing. Note that in this cluster analysis, all but one patient (P15) were correctly assigned to the group of non-responders (13 patients on the left), while the 10 patients on the right were grouped as responders. Gene symbols and fold change between the groups are listed to the right. Values<1 reflect down-regulation (white) in the class of responders, whereas values>1 reflect up-regulation (grey).

### DESCRIPTION OF THE INVENTION

[0010] The present invention relates, e.g., to the identification of genes and gene products (molecular markers, molecular signatures) from rectal adenocarcinomas whose expression, compared to a baseline value, is correlated with the responsiveness of the tumors to radiochemotherapy. As used herein, a “baseline value” includes, e.g., the expression in normal tissue, such as normal rectal tissue, e.g. from the subject or from a “pool” of normal subjects; or from a pool of different tissues from normal subjects. In a preferred embodiment, the expression is from a pool of cell lines (e.g. of carcinogenic origin), such as the universal human reference library available from Stratagene (catalogue no. 740000). The pooled values may be either commercially available or otherwise derived. Alternatively, the baseline value may be the expression in rectal carcinomas that are known to be “non-responders” to radiochemotherapy, e.g., the average value from a pool or compilation of such tumor samples. The baseline value may be available in a database compiled from any of such values.

[0011] About 54 molecular markers are identified herein that are expressed in a significantly altered amount in rectal carcinomas that are responsive to radiochemotherapy, compared to rectal adenocarcinomas that are not responsive. Of the 54 molecular markers, 13 are up-regulated, and 41 are down-regulated, in responders compared to non-responders. Of course, other genes, as well, may be differentially regulated in responders compared to non-responders.

[0012] These molecular markers can serve as the basis for diagnostic assays to determine the responsiveness of a rectal carcinoma to radiochemotherapy. For example, nucleic acid probes corresponding to one or more of the genes, and/or antibodies specific for proteins encoded by the genes, can be used to analyze a sample from a rectal tumor, in order to determine the responsiveness. Molecules (e.g. nucleic acid probes, antibodies, etc) corresponding to any number of the 54 identified genes, in any combination or permutation, can be used in compositions and methods of the invention. The genes and gene products can also aid in the identification of therapeutic agents, e.g. agents which can be administered in conjunction with radiochemotherapy, and which enhance the responsiveness of a rectal tumor to the radiochemotherapy. Furthermore, the identification of genes whose expression is correlated with responsiveness to radiochemotherapy can also provide a basis for explaining the different metabolic processes involved in such responsiveness, and thus can be used as research tools.

[0013] One aspect of the invention is a composition (combination) comprising one or a plurality of (preferably at least about 5, at least about 10, or at least about 15) isolated nucleic acids of at least about 8 contiguous nucleotides (e.g., at least about 12, 15, 25, 35, 50 or 75 contiguous nucleotides), selected from nucleic acids that correspond to genes 1-54 from Table 3, and comprising no more than about 1×10⁶ (e.g., no more than about 500,000; 200,000; 100,000; 50,000; 25,000; 14,000; 13000; 12,000; 11,000; 10,000; 9,000; 8,000; 7,000; 6,000; 5,000, 4,000; 3,000; 2,000; 1,000; 500; 250; 150; 70 or 50) total isolated nucleic acids. In embodiments of the invention, the composition comprises at least about 5 (e.g., at least about 10, 15, 25, 50, 54, 60, 70 or 100 or more) nucleic acids that correspond to genes 1-54 from Table 3. In embodiments of the invention, at least one of the nucleic acids that correspond to genes 1-54 contains at least about 50 contiguous nucleotides, and/or is a cDNA. For example, the nucleic acids corresponding to genes 1-54 of Table 3 may be selected from:

[0014] (a) nucleic acids that comprise the sequences of SEQ ID NOs: 1-58 or 113-123;

[0015] (b) nucleic acids that comprise sequences that are at least about 85% (e.g., at least about 90%, 95%, or 98%) identical to the sequences of SEQ ID NOs: 1-58 or 113-123;

[0016] (c) nucleic acids that comprise sequences encoding polypeptides represented by SEQ ID NOs: 59-112;

[0017] (d) nucleic acids that comprise sequences of active fragments of the nucleic acids of (a), (b), or (c);

[0018] (e) nucleic acids that comprise sequences of active variants of the nucleic acids of (a), (b), or (c) and/or

[0019] (f) nucleic acids that comprise complete complements of the sequences of any of the nucleic acids (a)-(e);

wherein the nucleic acids hybridize under conditions of high stringency to nucleic acids represented by SEQ ID NOs: 1-58 or 113-123, or to complements thereof.

[0020] The composition may be used, e.g., to determine the responsiveness of a rectal adenocarcinoma to radiochemotherapy.

[0021] As used herein, a “plurality” refers to two or more members, more preferably to a group of at least about 2, or at least about 5, or at least about 15, or at least about 54, etc., of the identified molecular markers.

[0022] As used herein, the term “isolated” nucleic acid (or polypeptide, or antibody) refers to a nucleic acid (or polypeptide, or antibody) that is in a form other than it occurs in nature, for example in a buffer, in a dry form awaiting reconstitution, as part of an array, a kit or a pharmaceutical composition, etc. The term an “isolated” nucleic acid or protein does not include a cell extract (e.g., a crude or semi-purified cell extract).

[0023] The majority of rectal tumors are carcinomas, and the majority of these rectal carcinomas are adenocarcinomas. The terms rectal tumor, carcinoma and adenocarcinoma are sometimes used interchangeably herein, with the understanding that the rectal tumors being discussed are preferably rectal adenocarcinomas. (It is noted that adenocarcinomas located in tissues other than the rectum may, under certain circumstances, also exhibit expression patterns similar to those discussed herein, with regard to responsiveness to radiochemotherapy.) A rectal adenocarcinoma that is “responsive to” radiochemotherapy is a tumor that is measurably more sensitive to such treatment than is a “non-responsive” tumor. The range of responsiveness of a responsive tumor may range widely. For example, in some cases, a responsive tumor may melt away, whereas in other cases, the reduction in size is not more than about 10%. Criteria for measuring responsiveness are known to skilled workers; some criteria are provided in the Examples.

[0024] The individual sequences of nucleic acids and proteins in the compositions and methods of the invention were publicly available at the time the invention was made. However, the relationship between expression of these sequences and the responsiveness of rectal adenocarcinomas to radiochemotherapy had not previously been observed; and the particular combinations of sequences in the compositions of the invention had not been disclosed or suggested.

[0025] The GenBank accession numbers and the sequences of some representative nucleic acids and proteins corresponding to genes 1-54 are provided in Table 3 (in Example II) and in the Sequence Listing attached hereto. Nucleic acids or proteins that “correspond to” a gene include nucleic acids or proteins that are expressed by the gene, or active fragments or variants of the expressed nucleic acids or proteins, or complements of the nucleic acids or fragments, etc. Only one strand of each nucleic acid is shown, but the complementary strand is understood to be included by any reference to the displayed strand. A “complement,” as used herein, is a complete (full-length) complementary strand (with no mismatches) of a single strand nucleic acid.

[0026] As is discussed more fully below, probes from NCI-cDNA arrays (e.g., probes obtained from Incyte) were used in the experiments described herein to identify the 54 molecular markers of the invention. Some of those probes represent full-length coding sequences, and others (e.g., probes corresponding to genes 3, 6, 14, 19, 28, 30, 32, 44, 45, 48 and 51) are less than full-length. Full-length nucleic acid sequences (e.g., full-length coding sequences or genomic sequences) that correspond to the less than full-length probes were obtained, using conventional methods to mine Genbank sequences. Both full-length and less than full-length sequences are listed in Table 3. Full-length SEQ ID NOs are listed in the first column of the table; and less than full-length coding sequences in the third column. The SEQ ID NOs listed in the second column of the table in general represent full length proteins. No protein sequences are listed for some of the short ESTs (e.g., genes 6, 28, 45 and 51); however, a skilled worker can readily identify open reading frames in these nucleic acid sequences and thus identify the corresponding protein sequences.

[0027] In a preferred embodiment, the nucleic acids corresponding to genes 1-54 of Table 3 are selected from the fifteen genes whose expression is most highly correlated in the study discussed herein with responsiveness of the tumors to radiochemotherapy [genes 1-12 (represented, e.g., by the nucleotide sequences of SEQ ID NOs: 1-15 and 113-114) and genes 42-44 (represented, e.g., by the nucleotide sequences of SEQ ID NOs: 46-48 and 120)]. That is, the nucleic acids in the composition (each having at least about 15 contiguous nucleotides) that correspond to genes in Table 3 may be selected from:

[0028] (a) nucleic acids that comprise sequences of SEQ ID NOs: 1-15, 113-114, 46-48, or 120;

[0029] (b) nucleic acids that comprise sequences that are at least about 85% (e.g., at least about 90%, 95%, or 98%) identical to SEQ ID NOs: 1-15, 113-114, 46-48, or 120;

[0030] (c) nucleic acids that comprise sequences encoding polypeptides represented by SEQ ID NOs 59-72 or 102-104;

[0031] (d) nucleic acids that comprise sequences of active fragments of the nucleic acids of (a), (b), or (c);

[0032] (e) nucleic acids that comprise sequences of active variants of the nucleic acids of (a), (b), or (c); and/or

[0033] (f) nucleic acids that comprise complete complements of any of the sequences of nucleic acids (a)-(e);

wherein the nucleic acids hybridize under conditions of high stringency to nucleic acids represented by SEQ ID NOs: 11-15, 113-114, 46-48, or 120, or to complements thereof.

[0034] The nucleic acids discussed above, and derivatives thereof, can be used as probes to identify (e.g., by hybridization assays) polynucleotides whose expression is altered, compared to a baseline value, in rectal adenocarcinomas that are responsive to radiochemotherapy. As noted, some of the SEQ ID NOs represent full-length cDNAs, and others represent cDNAs or ESTs that are partial copies of gene coding sequences. The invention includes fragments containing sequential nucleotides of the partial or full-length cDNAs; preferably, these fragments are at least about 8, or at least about 15, nucleotides in length, and are specific for the genes from which the corresponding cDNAs were obtained. As discussed in more detail below, skilled workers will recognize how to select suitable fragments of a given nucleic acid that will hybridize specifically to a polynucleotide of interest.

[0035] Compositions of the invention may comprise any combination of, e.g., at least about 1, 2, 5, 10, 15, 20, 25, 50, 55, 60, 75 or 100 or more of the mentioned nucleic acids and/or fragments that correspond to genes from Table 3. A nucleic acid composition of the invention may comprise, consist essentially of, or consist of, a total of, e.g., about 1, 2, 5, 10, 15, 20, 25, 50, 60, 70, 100, 150, 250, 500, 750, 1,000, 2,000, 3,000, 5,000, 7,000; 8,000; 9,000; 10,000, 11,000; 12,000; 13,000; 14,000; 15,000; 25,000, 50,000, 100,000, 200,000, 500,000, 1×10⁶, or more isolated nucleic acids. The term “consisting essentially of,” in this context, refers to a value intermediate between the specific number of the mentioned elements (here, nucleic acids) encompassed by the term “consisting of” and the large number encompassed by the term “comprising.” A nucleic acid composition of the invention preferably comprises no more than a total of, e.g., about 1×10⁶ (e.g., no more than about 500,000; 200,000; 100,000; 50,000; 25,000; 14,000; 13,000; 12,000; 11,000; 10,000; 9,000; 8,000; 7,000; 6,000; 5,000, 4,000; 3,000; 2,000; 1,000; 750; 500; 250; 150; 100; 70; 60; 50; 25; 20; 15; 10; 5; 2; or 1) isolated nucleic acids.

[0036] Another embodiment of the invention is a composition of nucleic acids or fragments which hybridize specifically under conditions of high stringency to nucleic acids from the set represented by the SEQ ID NOs corresponding to genes 1-54 (e.g., SEQ ID NOs: 1-58 and 113-123), or to complements thereof.

[0037] The nucleic acid compositions of the invention may be in the form of an aqueous solution (e.g., for use in solution hybridization), or the nucleic acids in the composition may be immobilized on a substrate. In some compositions of the invention, the isolated nucleic acids are in an array or a microarray, e.g., they are hybridizable elements on an array, such as a microarray. A nucleic acid array may further comprise, bound (e.g., bound specifically) to one or more nucleic acids of the array, polynucleotides from a sample representing expressed genes. In general, as used herein, the term “nucleic acid” refers to a probe, whereas the term “polynucleotide” refers to an expression product of a gene, or a derivative of such an expression product. The sample may be, e.g., from an individual subject's rectal adenocarcinoma; from a normal tissue, such as a normal rectal tissue; from a tissue known to be non-responsive or known to be responsive to radiochemotherapy; or combinations thereof. In one embodiment, the nucleic acids in an array and the polynucleotides from a sample representing expressed genes have been subjected to nucleic acid hybridization under high stringency conditions (such that nucleic acids of the array that are specific for particular polynucleotides from the sample are specifically hybridized to those polynucleotides).

[0038] In the nucleic acid compositions of the invention, at least one phosphate, sugar and/or base moiety in the helix may be modified. For example, a phosphate may be modified as a phosphorothioate, a phosphoridothioate, a phosphoramidothioate, a phosphoramidate, a phosphordiimidate, a methylsphosphonate, an alkyl phosphotriester, 3′-aminopropyl, a formacetal, or an analogue thereof.

[0039] Another embodiment is a composition comprising one or a plurality of (e.g., at least about 5, 10 or 15) isolated nucleic acids, each of which hybridizes specifically under high stringency conditions to part or all of a coding sequence whose expression reflects (is indicative of, is correlated with) responsiveness of a rectal adenocarcinoma to radiochemotherapy. Examples of some such nucleic acids are nucleic acids corresponding to genes 1-54, as discussed above (e.g., nucleic acids represented by SEQ ID NOs: 1-58 or 113-123, or active fragments, variants, or complements thereof).

[0040] Sequences “corresponding to” a gene, or “specific for” a gene include sequences that are substantially similar to (e.g., hybridize under conditions of high stringency to) one of the strands of the double stranded form of that gene. By hybridizing “specifically” is meant herein that two components (e.g. an expressed gene or polynucleotide and a nucleic acid probe) bind selectively to each other and not generally to other components unintended for binding to the subject components. The parameters required to achieve specific interactions can be determined routinely, using conventional methods in the art.

[0041] Another aspect of the invention is a composition (combination) comprising polypeptides that are of a size and structure that can be recognized and/or bound by an antibody. That is, the polypeptides are antigenic. Specifically, the composition comprises one or a plurality of (e.g., at least about 5, 10 or 15) isolated, antigenic polypeptides selected from polypeptides that correspond to genes 1-54 from Table 3. For example, the composition may comprise polypeptides selected from:

[0042] (a) polypeptides comprising SEQ ID NOs: 59-112;

[0043] (b) polypeptides encoded by polynucleotides comprising SEQ ID NOs: 1-58 or 113-123;

[0044] (c) polypeptides whose sequences are at least about 85% (e.g., at least about 90%, 95%, or 98%) identical to SEQ ID NOs: 59-112;

[0045] (d) active variants of (a), (b) or (c); and/or

[0046] (e) antigenic fragments of (a), (b) or (c),

wherein the polypeptides, active variants or antigenic fragments are of a size and structure that can be recognized, or bound by, an antibody.

[0047] In a preferred embodiment, the polypeptides in the above composition that correspond to genes from Table 3 are selected from the fifteen polypeptides whose expression is most highly correlated in the study discussed herein with responsiveness of the tumors to radiochemotherapy [genes 1-12 (represented, e.g., by the amino acid sequences of SEQ ID NOs 59-72) and genes 42-44 (represented, e.g., by the amino acid sequences of SEQ ID NOs: 102-104)]. That is, the composition may comprise polypeptides selected from:

[0048] (a) polypeptides comprising SEQ ID NOs: 59-72 or 102-104;

[0049] (b) polypeptides encoded by polynucleotides comprising SEQ ID NOs: 1-15, 113-114, 46-48 or 120);

[0050] (c) polypeptides whose sequences are at least about 85% (e.g., at least about 90%, 95%, or 98%) identical to SEQ ID NOs: 59-72 or 102-104;

[0051] (d) active variants of (a), (b), or (c); and/or

[0052] (e) antigenic fragments of (a), (b), or (c),

wherein the polypeptides, active variants or antigenic fragments are of a size and structure that can be recognized and/or bound by an antibody.

[0053] One use of such compositions of polypeptides of the invention is as a source for generating antibodies that can be used to detect the responsiveness of a rectal adenocarcinoma to radiochemotherapy.

[0054] A composition of polypeptides of the invention may comprise any combination of, e.g., at least about 1, 2, 5, 10, 15, 25, 50, 55, 60, 75, 100 or more of the mentioned isolated polypeptides, variants or fragments that correspond to genes from Table 3. A polypeptide composition of the invention may comprise, consist essentially of, or consist of, e.g., at least about 1, 2, 5, 10, 15, 25, 50, 75, 100, 200, 500, 750, 1,000, 2,000, 3,000, 5,000, 10,000, 25,000, 50,000, 100,000, 200,000, 500,000, 1×10⁶, 5×10⁶ or more total isolated polypeptides.

[0055] Another embodiment is a composition comprising one or a plurality of (e.g., at least about 5, 10 or 15) isolated, antigenic, polypeptides for use in generating antibodies for detecting the response of a rectal adenocarcinoma to radiochemotherapy, wherein said polypeptides are polypeptides whose expression is correlated with responsiveness of the adenocarcinoma to radiochemotherapy.

[0056] Another aspect of the invention is a composition comprising antibodies specific for the polypeptides of the invention. As used herein, an antibody that is “specific for” a polypeptide includes an antibody that binds selectively to the polypeptide and not generally to other polypeptides unintended for binding to the antibody. The parameters required to achieve such specificity can be determined routinely, using conventional methods in the art.

[0057] One embodiment of the invention is a composition comprising selected numbers of such antibodies, which are in a form that permits their binding to the polypeptides for which they are specific. Specifically, the composition comprises one or a plurality of isolated antibodies (preferably at least about 5, 10 or 15 isolated antibodies), which are selected from antibodies that are specific for polypeptides corresponding to genes 1-54 from Table 3. Preferably, the antibodies are specific for polypeptides corresponding to genes 1-12 or 42-44 from Table 3. For example, the antibodies may be specific for polypeptides selected from:

[0058] (a) polypeptides comprising SEQ ID NOs: 59-112 (particularly SEQ ID NOs: 59-72 or 102-104);

[0059] (b) polypeptides encoded by polynucleotides comprising SEQ ID NOs: 1-58 or 113-123 (particularly SEQ ID NOs: 1-15, 46-48, 113-114, or 120);

[0060] (c) polypeptides that are at least about 85% (e.g., at least about 90%, 95%, or 98%) identical to SEQ ID NOs: 59-112 (particularly to SEQ ID NOs: 59-72 or 102-104);

[0061] (d) polypeptides that are active variants of (a), (b), or (c); and/or

[0062] (e) polypeptides that are antigenic fragments of (a), (b) or (c).

[0063] Generally, the antigenic fragments comprise at least about 8 or at least about 12 contiguous amino acids of said polypeptide sequences.

[0064] The antibody compositions of the invention may be used, e.g., to determine the responsiveness of a rectal adenocarcinoma to radiochemotherapy.

[0065] The above compositions may comprise any combination of, e.g., at least about 1, 2, 5, 10, 15, 20, 25, 35, 45, 55, 65, 75, 100, 200, 300, 400, 500 or more of the mentioned isolated antibodies or antibody fragments specific for genes that correspond to genes from Table 3. An antibody composition of the invention may comprise, consist essentially of, or consist of a total of, e.g., at least about 1, 2, 5, 10, 15, 20, 25, 50, 60, 70, 100, 125, 150, 200, 250, 300, 400, 500, 750, 1,000, 2,000, 3,000, 5,000, 7,000; 8,000; 9,000; 10,000, 11,000; 12,000; 13,000; 14,000; 15,000; 25,000, 50,000, 100,000, 200,000, 500,000, 1×10⁶ or more isolated antibodies. In embodiments of the invention, the composition comprises no more than about 1,000 (e.g., no more than about 500,000; 200,000; 100,000; 50,000; 25,000; 14,000; 13,000; 12,000; 11,000; 10,000; 9,000; 8,000; 7,000; 6,000; 5,000, 4,000; 3,000; 2,000; 1,000; 750; 500; 400; 300; 250; 200; 150; 125; 100; 70; 60; 50; 25; 20; 15; 10; 5; 2; or 1) total isolated antibodies.

[0066] The isolated antibodies in any of the above compositions may be in the form of an aqueous solution (e.g., in a form suitable for radioimmunoassay), or the isolated antibodies may be immobilized on a substrate. In embodiments of the invention, the isolated antibodies are in an array, e.g., a microarray; they may be reactive elements on an array, such as a microarray. By “reactive” elements is meant that the antibodies can react, e.g., bind, in a specific manner, with antigens for which they are specific.

[0067] Another aspect of the invention is a method for detecting (e.g., measuring, or quantitating) one or more polynucleotides or polypeptides of the invention in a sample, such as a sample from a rectal adenocarcinoma, compared to a baseline value. Generally, the detected polynucleotides or polypeptides correspond to a gene whose expression is correlated with responsiveness of the tumor to radiochemotherapy (e.g., genes 1-54 from Table 3). The method is generally a method for determining the responsiveness of the rectal adenocarcinoma to radiochemotherapy. In one embodiment, this method involves contacting the sample with a composition of nucleic acids, or of antibodies, of the invention, under conditions effective for specific binding of the nucleic acids to the polynucleotides in the sample (such as hybridization under conditions of high stringency), or effective for specific binding of the antibodies to the polypeptides in the sample. The method may further comprise detecting (e.g., determining the amount of) the polynucleotides in the sample which have bound to the nucleic acids, or detecting (e.g., determining the amount of) the polypeptides in the sample which have bound to the antibodies. Preferably, the polynucleotides or polypeptides that are detected reflect expression (either up-regulation or down-regulation) that is correlated with (indicative of) responsiveness of the adenocarcinoma to radiochemotherapy.

[0068] For example, a decrease in the amount (level of expression) of one or more of set #1 of 41 polynucleotides or polypeptides in a sample indicates that the adenocarcinoma is responsive to radiochemotherapy. Set #1 comprises nucleic acids corresponding to genes 1-41 (e.g., nucleic acids that comprise SEQ ID NOs: 1-45 or 113-119, or that can hybridize specifically (e.g., under conditions of high stringency) to those nucleic acids, or that are complements of those nucleic acids, etc.); and the corresponding polypeptides, which comprise sequences corresponding to genes 1-41 (e.g., polypeptides comprising SEQ ID NOs: 59-102, etc.).

[0069] An increase in the amount (level of expression) of one or more of set #2 of 13 polynucleotides or polypeptides in a sample indicates that the adenocarcinoma is responsive to radiochemotherapy. Set #2 comprises nucleic acids corresponding to genes 42-54 (e.g., nucleic acids that comprise SEQ ID NOs: 46-58 or 120-123, or that can hybridize specifically (e.g., under conditions of high stringency) to those nucleic acids, or that are complements of those nucleic acids, etc.); and the corresponding polypeptides, which comprise sequences corresponding to genes 42-54 (e.g., polypeptides comprising SEQ ID NOs: 102-112, etc.).

[0070] In assays described herein, a given polynucleotide or polypeptide may or may not be expressed in an increased or decreased amount in a sample from a rectal adenocarcinoma, compared to a baseline value. In a general sense, this invention relates to methods to determine if a gene product is expressed in an increased or decreased amount, irrespective of whether such increased or decreased expression is detected.

[0071] The rectal adenocarcinoma evaluated in this method is preferably from a human patient. The patient may not have been subjected to surgery, such as rectal resection, i.e., the patient is preoperative. In this case, the method can provide information as to whether preadjuvant therapy is advisable. Alternatively, the patient may have already been subjected to surgery, such as rectal resection, i.e., the patient is postoperative. In this case, the method can provide information as to whether adjuvant therapy is advisable.

[0072] In one embodiment, the method comprises determining in a polynucleotide sample which represents expressed genes in a rectal adenocarcinoma the amount (level of expression), compared to a baseline value, of one or a plurality of (e.g., at least about 5, 10 or 15) polynucleotides whose expression is correlated with the responsiveness of the adenocarcinoma to radiochemotherapy. For example, the expression of genes selected from genes 1-54 of Table 3 can be measured. As used herein, the term “polynucleotide” sample in general refers to expression products of genes, such as mRNA, or derivatives of such expression products, such as, e.g., cRNA, cDNA, or PCR amplification products. The term “nucleic acid” generally refers to a nucleic acid used as a probe to detect such polynucleotides.

[0073] In one embodiment of this method, each of the polynucleotides can hybridize specifically (e.g., under conditions of high stringency) to one of the nucleic acids noted above. For example, the nucleic acids may be selected from nucleic acids comprising SEQ ID NOs: 1-58 or 113-123 (in particular, SEQ ID NOs: 1-15, 46-48, 113-114, or 120), and/or the mentioned fragments or variants thereof (e.g., nucleic acids that are at least about 90%, 95% or 98% identical to those SEQ ID NOs; nucleic acids that encode polypeptides represented by SEQ ID NOs: 59-112 (in particular, SEQ ID NOs: 59-72 or 102-104); active fragments that comprise at least about 8 to 15 contiguous nucleotides of any of those nucleic acids; active variants of any of those nucleic acids; or complements of any of the above nucleic acids). In embodiments of this method, the amount (level of expression) of at least about 1, 2, 5, 10, 25, 50, or 54 of the polynucleotides corresponding to genes 1-54 from Table 3 is determined.

[0074] In one embodiment of the method, the amount (level of expression) of polynucleotides in a sample is determined by hybridizing polynucleotides in the sample to a nucleic acid composition of the invention, under conditions of high stringency, and comparing the amount of hybridization to a baseline value. In embodiments of this method, the nucleic acids are immobilized on a substrate, and/or are in an array, e.g. are hybridizable elements on an array, such as a microarray.

[0075] The amount of hybridization of a polynucleotide in the sample to a nucleic acid specific for it in the nucleic acid composition generally reflects the level of expression of the polynucleotide in the rectal adenocarcinoma.

[0076] The baseline value may be obtained, for example, by hybridizing a nucleic acid composition of the invention, under conditions of high stringency, to a control polynucleotide sample. For example, one can use a polynucleotide sample obtained from normal tissue, such as a normal rectal tissue, e.g. from the subject or from a “pool” of normal subjects; or to a polynucleotide obtained from a pool of different tissues of normal subjects. In a preferred embodiment, one uses a pool of cell lines of carcinogenic origin, such as the universal human reference library available from Stratagene (catalogue no. 740000). The pooled values may be either commercially available or otherwise derived. Alternatively, the baseline value may be the expression in rectal carcinomas that are known to be “non-responders” to radiochemotherapy, e.g., the average value from a pool or compilation of such tumor samples. Any of the above types of baseline values may available in a database compiled from such values.

[0077] In another embodiment of this method, the determination of the amount (level of expression) of polynucleotides in a sample is performed by quantitatively amplifying polynucleotides in the rectal adenocarcinoma sample with primers specific for those polynucleotides, and comparing the amount of amplified polynucleotide to a baseline value. For example, conventional methods of RT-PCR may be used. In one embodiment, the polynucleotides from the rectal adenocarcinoma sample (and, optionally, from controls) are labeled with a detectable label, e.g., a fluorescent label.

[0078] In another embodiment, the method comprises determining in a polypeptide sample from a rectal adenocarcinoma the amount (level of expression), compared to the amount (level of expression) of a baseline value, of each of one or a plurality of polypeptides whose expression is correlated with the responsiveness of the adenocarcinoma to radiochemotherapy (e.g., polypeptides corresponding to genes 1-54 of Table 3). The polypeptides may be selected from polypeptides that bind specifically to antibodies specific for polypeptides:

[0079] (a) comprising SEQ ID NOs: 59-112 particularly SEQ ID NOs: 59-72 or 102-104);

[0080] (b) encoded by polynucleotides comprising SEQ ID NOs: 1-58 and 113-123 (particularly SEQ ID NOs: 1-15, 46-48, 113-114, and 120);

[0081] (c) whose sequences are at least about 85% (e.g., at least about 90%, 95%, or 98%) identical to SEQ ID NOs: 59-112 (particularly to SEQ ID NOs: 59-72 and 102-104);

[0082] (d) that are active variants of (a), (b), or (c); and/or

[0083] (e) that are antigenic fragments of (a), (b) or (c).

[0084] An altered amount (level of expression) of one or more of the polypeptides compared to a baseline value is correlated with the responsiveness of the rectal adenocarcinoma to radiochemotherapy. In embodiments of the invention, the amount of at least about 1, 2, 5, 10, 50 or 54 of the polypeptides is determined.

[0085] In one embodiment of this method, the determination is performed by:

[0086] contacting said polypeptide sample with an antibody composition containing one or a plurality of antibodies specific for polypeptides comprising polypeptides (a), (b), (c), (d) and/or (e) above, under conditions effective for at least one of said antibodies to bind specifically to the corresponding polypeptide (polypeptide for which it is specific), and

[0087] comparing the amount (degree) of specific binding of to a baseline value.

[0088] The antibody composition may be in the form of an aqueous solution; the antibodies may be immobilized on a substrate or surface (e.g., a surface suitable for surface plasmon resonance (SPR)-based technology); and/or the antibodies may be in an array, e.g. they may be reactive elements on an array, such as a microarray.

[0089] The amount of binding of a polypeptide in the sample to an antibody specific for it in the antibody composition generally reflects the amount (level of expression) of the polypeptide in the rectal adenocarcinoma.

[0090] The baseline value may reflect the amount of the polypeptides expressed in normal tissue. For example, it may be obtained by contacting the antibody composition, under conditions as above, to a polypeptide sample obtained from normal rectal tissue, e.g., from the subject or a reference “pool” of normal subjects; or to a polypeptide sample obtained from a pool of different tissues of normal subjects. In a preferred embodiment, one uses a pool of cell lines of carcinogenic origin, such as the universal human reference library available from Stratagene (catalogue no. 740000). The pooled values may be either commercially available or otherwise derived. Alternatively, the baseline value may be determined with rectal carcinomas that are known to be “non-responders” to radiochemotherapy, e.g., the average value from a pool or compilation of such tumor samples. Any of the above types of baseline values may available in a compiled database.

[0091] Another aspect of the invention is a kit (e.g. for detecting the presence and/or amount of a polynucleotide in a sample from a rectal adenocarcinoma, which may indicate that the rectal adenocarcinoma is responsive to radiochemotherapy), comprising a composition of nucleic acids of the invention (e.g., in the form of an array) and, optionally, one or more reagents that facilitate hybridization of the nucleic acids in the composition to a test polynucleotide(s) of interest, and/or that facilitate detection of the hybridized polynucleotide(s), e.g., that facilitate detection of fluorescence. The kit may comprise a composition of nucleic acids of the invention (e.g., in the form of an array), means for carrying out hybridization of the nucleic acids in the composition to a test polynucleotide(s) of interest, and/or for means for reading hybridization results. Hybridization results may be units of fluorescence.

[0092] Another aspect is a kit (e.g. for detecting the presence and/or amount of a polypeptide in a sample from a rectal adenocarcinoma, which may indicate that the rectal adenocarcinoma is responsive to radiochemotherapy), comprising a composition of antibodies of the invention (e.g., in the form of an array) and, optionally, one or more reagents that facilitate binding of the antibodies in the composition with a test polypeptide(s) of interest, or that facilitate detection of bound antibody. The kit may comprise a composition of antibodies of the invention (e.g., in the form of an array), means for carrying out binding of the antibodies in the array to a test polynucleotide(s) of interest, and/or means for reading the binding results.

[0093] Another aspect of the invention is a method for identifying a candidate for an agent (e.g., a drug) that enhances (e.g., facilitates, increases, potentiates) the response of a rectal adenocarcinoma to radiochemotherapy. Such an agent would be particularly valuable if administered to a patient in conjunction with radiochemotherapy. One embodiment of this method comprises

[0094] (a) contacting a rectal adenocarcinoma cell with a putative agent;

[0095] (b) hybridizing a sample of polynucleotides representing expressed genes obtained from the contacted adenocarcinoma cell to a nucleic acid composition of the invention, under conditions effective for specific hybridization of a nucleic acid probe of the invention to its corresponding polynucleotide target (e.g., under high stringency hybridization conditions); and

[0096] (c) determining the amount (level of) of specific hybridization of one or more of the polynucleotides in the sample to one or more of the nucleic acids in the composition, compared to the amount in the absence of the putative agent,

[0097] wherein the amount of specific hybridization of a polynucleotide reflects the amount (level) of its expression in the contacted adenocarcinoma cell, and

[0098] wherein a putative agent that reduces the expression of one or more polynucleotides of the invention corresponding to genes 1-41, or that enhances the expression of one or more polynucleotides of the invention corresponding to genes 42-54, compared to the amount in the absence of the putative agent, is a candidate for an agent that enhances the response of a rectal adenocarcinoma to radiochemotherapy. The method may further comprise assessing the ability of the candidate agent to enhance responsiveness of an adenocarcinoma to radiochemotherapy in vivo.

[0099] Another aspect of the invention is a method for identifying a candidate for an agent (e.g., a drug) that enhances the response of a rectal adenocarcinoma to radiochemotherapy, comprising,

[0100] (a) contacting a rectal adenocarcinoma cell with a putative agent;

[0101] (b) contacting a sample of polypeptides obtained from the contacted adenocarcinoma cell with an antibody composition of the invention, under conditions effective for specific binding of an antibody to its corresponding polypeptide; and

[0102] (c) determining the amount (level of) of specific binding of one of more of the polypeptides in the sample to one of more of the antibodies of the composition, compared to the amount in the absence of the putative agent,

[0103] wherein the amount of specific binding of a polypeptide reflects the amount (level) of its expression in the contacted adenocarcinoma, and

[0104] wherein a putative agent that reduces the expression of one or more polypeptides of the invention corresponding to genes 1-41, or that enhances the expression of one or more polynucleotides of the invention corresponding to genes 42-54, compared to the amount in the absence of the putative agent, is a candidate for an agent that enhances the response of a rectal adenocarcinoma to radiochemotherapy. The method may further comprise assessing the ability of the candidate agent to enhance responsiveness of an adenocarcinoma to radiochemotherapy in vivo.

[0105] Another aspect of the invention is a method for identifying target genes for therapy of rectal adenocarcinomas.

[0106] One embodiment is a method for identifying a gene whose inhibition (of expression or activity) enhances the response of a rectal adenocarcinoma to radiochemotherapy, comprising

[0107] (a) inhibiting in a rectal adenocarcinoma the expression and/or activity of a gene selected from genes 1 through 41, or the expression and/or activity of a gene product of one of those genes; and

[0108] (b) determining if the rectal tumor exhibits an increased response to radiochemotherapy compared to a baseline value.

[0109] Another embodiment is a method for identifying a gene whose stimulation (of expression or activity) enhances the response of a rectal adenocarcinoma to radiochemotherapy, comprising

[0110] (a) stimulating in a rectal adenocarcinoma the expression and/or activity of a gene selected from genes 42 through 54, or the expression and/or activity of a gene product of one of those genes; and

[0111] (b) determining if the rectal tumor exhibits an increased response to radiochemotherapy compared to a baseline value.

[0112] In the present application, the term “nucleic acid” (e.g., with reference to probe molecules) refers both to DNA (including cDNA) and RNA, as well as DNA-like or RNA-like materials, such as branched DNAs, peptide nucleic acids (PNA) or locked nucleic acids (LNA). Nucleic acid probes for gene expression analysis include those comprising ribonucleotides, deoxyribonucleotides, both, and/or their analogues. Nucleic acids of the invention include double stranded and partially or completely single stranded molecules. In a preferred embodiment, probes for gene expression comprise single stranded nucleic acid molecules that are complementary to an mRNA target expressed by a gene of interest, or that are complementary to the opposite strand (e.g., complementary to a first strand cDNA generated from the mRNA).

[0113] Several nucleic acid probe sequences described herein are cDNAs complementary to genes or gene fragments; some are ESTs. For purposes of the analysis, it is not necessary that the full length sequence be known, as those of skill in the art will know how to obtain the full length sequence using the sequence of a given fragment or EST and known data mining, bioinformatic, and DNA sequencing methodologies without undue experimentation. If desired, the skilled artisan can subsequently select as a probe a nucleic acid that is longer than the initial gene fragment or EST, or a suitable fragment selected from that extended sequence. Many full length sequences (e.g., full-length coding sequences or genomic sequences) have been determined from less than full-length sequences used in the experiments described herein; these full length sequences are provided in Table 3. Again, a skilled worker can readily select suitable probe sequences, corresponding to coding sequences, using conventional procedures. Since some of the probe sequences are identified solely based on expression levels, it is not essential to know a priori the function of a particular gene.

[0114] The present invention includes a variety of active variants of nucleic acids. For example, nucleic acid probes can be sequence variants of the sequences described herein (e.g., they can include nucleotide substitutions, small insertions or deletions, nucleotide analogues, etc.); or they can be chemical variants (e.g., they can contain chemical derivatives); or they can be length variants. An “active variant,” as used herein, is a variant that retains a measurable amount of an activity of the starting material. For example, an active variant of a nucleic acid probe retains an adequate ability to hybridize specifically to a complementary DNA strand (or mRNA) in a test sample. Preferably, an active variant of a nucleic acid probe also exhibits adequate resistance to nucleases and stability in the hybridization protocols employed. DNA or RNA may be made more resistant to nuclease degradation, e.g., by incorporating modified nucleosides (e.g., 2′-O-methylribose or 1′-α-anomers), or by modifying internucleoside linkages (e.g., methylphosphonates or phosphorothioates), as described below.

[0115] With regard to sequence variants, the invention includes nucleic acid probes which exhibit variations in sequence compared to the wild type sequence, provided the probe retains the ability to hybridize specifically to the polynucleotide to which it corresponds (e.g., to the nucleic acid from which it is derived, or a complement thereof). For example, small deletions, insertions, substitutions, rearrangements etc. are tolerated. The sequence changes may be introduced artificially, or they may be naturally occurring, e.g., changes reflecting degeneracy of the genetic code, allelic variants, species homologues, etc.

[0116] Nucleotide analogues can be incorporated into the nucleic acids by methods well known in the art. The only requirement is that the incorporated nucleotide analogues must serve to base pair with target polynucleotide sequences. For example, certain guanine nucleotides can be substituted with hypoxanthine which base pairs with cytosine residues. However, these base pairs are less stable than those between guanine and cytosine. Alternatively, adenine nucleotides can be substituted with 2,6-diaminopurine which can form stronger base pairs than those between adenine and thymidine.

[0117] The invention also relates to nucleic acid probes that are at least about 70%, 75%, 80%, 85%, 90%, 95%, 98% or 99% identical in sequence to a polynucleotide target of interest, or to a complement thereof. The invention also relates to nucleic acid probes that are at least about 70%, 75%, 80%, 85%, 90%, 95%, 98% or 99% identical or complementary to one of the nucleic acids of the invention corresponding to genes 1-54. Conventional algorithms can be used to determine the percent identity or complementarity, e.g., as described by Lipman and Pearson (Proc. Natl Acad Sci 80:726-730, 1983) or Martinez/Needleman-Wunsch (Nucl Acid Research 11:4629-4634, 1983).

[0118] The invention also relates to nucleic acid probes that hybridize specifically to corresponding target polunucleotides, e.g., under conditions of high stringency. Hybridization conditions are discussed elsewhere herein. Some nucleic acid probes may not hybridize effectively under hybridization conditions due to secondary structure. To optimize probe hybridization, the probe sequences may be examined using a computer algorithm to identify portions of genes without potential secondary structure. Such computer algorithms are well known in the art, such as OLIGO 4.06 Primer Analysis Software (National Biosciences, Plymouth, Minn.) or LASERGENE software (DNASTAR, Madison, Wis.); MACDASLS software (Hitachi Software Engineering Co, Std. South San Francisco, Calif.) and the like. These programs can search nucleotide sequences to identify stem loop structures and tandem repeats and to analyze G+C content of the sequence (those sequences with a G+C content greater than 60% are excluded). Alternatively, the probes can be optimized by trial and error. Experiments can be performed to determine whether probes and complementary target polynucleotides hybridize optimally under experimental conditions.

[0119] With regard to chemical variants, the nucleic acids can include nucleotides that have been derivatized chemically or enzymatically. Typical chemical modifications include derivatization with acyl, alkyl, aryl or amino groups. Suitable modified base moieties include, for example, 5-fluorouracil, 5-bromouracil, 5-chlorouracil, 5-iodouracil, hypoxanthine, xanthine, 4-acetylcytosine, 5-(carboxyhydroxylmethyl)uracil, 5-carboxymethylaminomethyl-ω-thiouridine, 5-carboxymethyl-aminomethyl uracil, dihydrouracil, β-D-galactosylqueosine, inosine, N6-isopentenyladenine, 1-methylguanine, 3-methyl-cytosine, 5-methylcytosine, N6-adenine, 7-methylguanine, 5-methylaminomethyluracil, 5-methoxyamino-methyl-2-thiouracil, β-D-mannosylqueosine, 5-methoxy-carboxymethyluracil, 5-methoxyuracil-2-methylthio-N6-iso-pentenyladenine, uracil-5-oxyacetic acid, butoxosine, pseudouracil, queuosine, 2-thio-cytosine, 5-methyl-2-thiouracil, 2-thiouracil, 4-thiouracil, 5-methyluracil, uracil-5-oxyacetic acid methylester, uracil-t-oxyacetic acid, 5-methyl-2-thiouracil, 3(3-amnino-3-N-2-carboxypropyl) uracil and 2,6-diaminopurine.

[0120] The nucleic acid may comprise at least one modified sugar moiety including, but not limited, to arabinose, 2-fluoroarabinose, xylulose, and hexose.

[0121] The nucleic acid may comprise a modified phosphate backbone synthesized from one or more nucleotides having, for example, one of the following structures: a phosphorothioate, a phosphoridothioate, a phosphoramidothioate, a phosphoramidate, a phosphordiimidate, a methylphosphonate, an alkyl phosphotriester, 3′-aminopropyl and a formacetal or analog thereof.

[0122] The nucleic acid may be an α-anomeric oligonucleotide which forms specific double-stranded hybrids with complementary RNA in which, contrary to the usual β-units, the strands run parallel to each other (Gautier et al. (1987), Nucl. Acids Res. 15:6625-6641).

[0123] The nucleic acid may be conjugated to another molecule, e.g., a peptide, a hybridization-triggered cross-linking agent, a hybridization-triggered cleavage agent, etc., all of which are well-known in the art.

[0124] With regard to length variants (active fragments), those skilled in the art will appreciate that a probe of choice for a particular gene can be the full length coding sequence or any fragment thereof having generally at least about 8 or at least about 15 nucleotides. When the full length sequence is known, the practitioner can select any appropriate fragment of that sequence, using conventional methods. In some embodiments, multiple probes, corresponding to different portions of a given SEQ ID (molecular marker) of the invention, are used. For example, probes representing about 10 non-overlapping 20-mers can be selected from a 200-mer sequence. Thus, for example, if each of the 54 molecular markers of the invention is represented by 10 probes, the total number of the probes corresponding to the molecular markers in the composition (e.g., in a microarray) will be 540. A skilled worker can design a suitable selection of overlapping or non-overlapping probes corresponding to each expressed polynucleotide of interest, without undue experimentation.

[0125] A nucleic acid probe of the invention can be of any suitable length. The size of the DNA sequence of interest may vary, and is preferably from about 8 to about 10,000 nucleotides, e.g. from about 50 to about 3,500 nucleotides. In some embodiments, full-length coding sequences are preferred. In others, the nucleic acids range from about 50 to about 200 nucleotides, preferably from about 50 to about 80 nucleotides. All ranges provided herein include the end point values. Any nucleic acid that can uniquely identify a polynucleotide of the invention (e.g., that can hybridize to it specifically) is included in the invention. In general, a nucleic acid comprising at least about 8, 10, 15, 20 or 25 or more contiguous nucleotides contains sufficient information to specify uniquely a gene of a mammalian (e.g., human) genome. Practically, larger oligonucleotides are generally used as probes.

[0126] Nucleic acid probes (e.g., oligonucleotides) of this invention may be synthesized, in whole or in part, by standard synthetic methods known in the art. See, e.g., Caruthers et al. (1980) Nucleic. Acids Symp. Ser. (2) 215-233; Stein et al. (1998), Nucl. Acids Res. 16, 3209; and Sarin et al. (1988), Proc. Natl. Acad. Sci. U.S.A 85, 7448-7451. An automated synthesizer (such as those commercially available from Biosearch, Applied Biosystems) may be used. cDNA probes can be cloned and isolated by conventional methods; can be isolated from pre-existing clones, such as those from Incyte as described herein; or can be prepared by a combination of conventional synthetic methods.

[0127] A composition comprising nucleic acids of the invention can take any of a variety of forms. For example, the nucleic acids can be free in a solution (e.g., an aqueous solution), and can, e.g., be subjected to hybridization in solution to polynucleotides from a sample of interest. Methods of hybridization in solution are well-known in the art.

[0128] Alternatively, the nucleic acids can be in the form of an array. The term “array” as used herein means an ordered arrangement of addressable, accessible, spatially discrete or identifiable, molecules disposed on a surface. The molecules in the array can be hybridizable elements (e.g., nucleic acids) or reactive elements (e.g., antibodies). Arrays can comprise any number of sites that comprise probes, from about 5 to, in the case of a microarray, tens to hundreds of thousands or more.

[0129] Any of a variety of suitable, compatible surfaces can be used in conjunction with this invention. The surface (usually a solid, preferably a suitable rigid or semi-rigid support) can be any of a variety of organic or inorganic materials or combinations thereof, including, merely by way of example, plastics such as polypropylene or polystyrene; ceramic; silicon; (fused) silica, quartz or glass, which can have the thickness of, for example, a glass microscope slide or a glass cover slip; paper, such as filter paper; diazotized cellulose; nitrocellulose filters; nylon membrane; or polyacrylamide gel pad. Substrates that are transparent to light are useful when the method of performing an assay involves optical detection. Suitable surfaces include membranes, filters, chips, slides, wafers, fibers, magnetic or nonmagnetic beads, gels, tubing, plates, polymers, microparticles, capillaries, or the like. The substrate can have a variety of surface forms, such as wells, trenches, pins, channels and pores, to which the nucleic acid probes are bound. The shape of the surface is not critical. It can, for example, be a flat surface such as a square, rectangle, or circle; a curved surface; or a three dimensional surface such as a bead, particle, strand, precipitate, tube, sphere, etc. Microfluidic devises are also encompassed by the invention.

[0130] In a preferred embodiment, a composition of nucleic acids is in the form of a microarray (sometimes referred to as a DNA “chip”). Microarrays allow for massively parallel gene expression analysis. See, e.g., Lockhart et al (2002), Nature 405, 827-836 and Phimister (1999), Nature Genetics 21(supp), 1-60. In a microarray, the array elements are arranged so that there are preferably at least one or more different array elements, more preferably at least about 100 array elements, and most preferably at least about 1,000 array elements, on a 1 cm² substrate surface. The maximum number of array elements is unlimited, and can be at least 100,000 array elements. Furthermore, the hybridization signal from each of the array elements is individually distinguishable.

[0131] Methods of making DNA arrays, including microarrays are conventional. For example, the probes may be synthesized directly on the surface; or preformed molecules, such as oligonucleotides or cDNAs, may be introduced onto (e.g., bound to, or otherwise immobilized on) the surface. Among suitable fabrication methods are photolithography, pipetting, drop-touch, piezoelectric printing (ink-jet), or the like. For some typical methods, see Ekins et al. (1999), Trends in Biotech 17, 217-218; Healey et al. (1995) Science 269, 1078-80; WO95/251116; WO95/35505; and U.S. Pat. No. 5,605,662.

[0132] Furthermore, the probes do not have to be directly bound to the substrate, but rather can be bound to the substrate through a linker group. The linker groups are typically about 6 to 50 atoms long to provide exposure to the attached nucleic acid probe. Preferred linker groups include ethylene glycol oligomers, diamines, diacids and the like. Reactive groups on the substrate surface react with one of the terminal portions of the linker to bind the linker to the substrate. The other terminal portion of the linker is then functionalized for binding the nucleic acid probe.

[0133] A composition of the invention may comprise, optionally, nucleic acids (or polypeptides, or antibodies) that act as internal controls. The controls may be positive controls or negative controls, examples of which will be evident to the skilled worker.

[0134] In order to conduct an analysis of expressed genes, a sample representing expressed target genes (polynucleotides or polypeptides) is first derived from a rectal adenocarcinoma. As used herein, “polynucleotide” refers to a target whose expression is analyzed, whereas “nucleic acid” refers to a composition (of probes) used to analyze the expression of the polynucleotides. The sample can be derived from any bodily fluid (blood, urine, saliva, phlegm, gastric juices, etc.), from stool samples, or from cultured cells. Preferably, the sample is derived from rectal biopsy tissue. Because rectal adenocarcinoma cells can also be present in peripheral blood, blood samples may also be used.

[0135] DNA or RNA can be isolated according to any of a number of methods well known to those of skill in the art. For example, methods of purification of nucleic acids are described in Laboratory Techniques in Biochemistry and Molecular Biology: Hybridization With Nucleic Acid Probes, Part I. Theory and Nucleic Acid Preparation, P. Tijssen, ed. Elsevier, New York, N.Y. (1993). In one case, total RNA is isolated using the TRIZOL total RNA isolation reagent (Life Technologies, Gaithersburg, Md.) and mRNA is isolated using oligo d(T) column chromatography or glass beads. Alternatively, when target polynucleotides are derived from an mRNA, the target polynucleotide can be a cDNA reverse transcribed from an mRNA, an RNA transcribed from that cDNA, a DNA amplified from that cDNA, an RNA transcribed from the amplified DNA, or the like. When the target polynucleotide is derived from DNA, the target polynucleotide can be DNA amplified from DNA or RNA reverse transcribed from DNA. In yet another alternative, the targets are target polynucleotides prepared by more than one method. Accordingly, a polynucleotide sample “representing expressed genes” can comprise, e.g., mRNA, cRNA, cDNA, PCR products, or the like.

[0136] When target polynucleotides are amplified it is desirable to amplify the polynucleotide and maintain the relative abundances of the original sample, including low abundance transcripts. Total mRNA can be converted to cDNA and amplified by conventional procedures. For example, in one embodiment, mRNA is amplified by reverse transcription using a reverse transcriptase and a primer consisting of oligo d(T) and a sequence encoding the phage T7 promoter to provide a single stranded DNA template. The second cDNA strand is polymerized using a DNA polymerase and a RNAse which assists in breaking up the DNA/RNA hybrid. After synthesis of the double stranded cDNA, T7 RNA polymerase can be added and RNA transcribed from the second cDNA strand template (Van Gelder et al. U.S. Pat. No. 5,545,522). RNA can be amplified in vitro, in situ or in vivo (See Eberwine, U.S. Pat. No. 5,514,545). A cDNA may be amplified by any of a variety of conventional amplification procedures, including PCR. Suitable PCR primers can be selected using routine, any-recognized methods. For guidance with regard to designing suitable primers and other facets of PCR methodology, see Innes et al. eds. PCR Protocols: a guide to methods and applications, 1990, Academic Press, San Diego, Calif. or other standard references or manuals.

[0137] It is advantageous to include quantitation controls within the sample to assure that amplification and labeling procedures do not change the true distribution of target polynucleotides in a sample. For this purpose, a sample can be spiked with a known amount of a control target polynucleotide and the composition of nucleic acid probes can include reference nucleic acid probes which specifically hybridize with the control target polynucleotides. After hybridization and processing, the hybridization signals obtained should reflect accurately the amounts of control target polynucleotide added to the sample.

[0138] Prior to hybridization, it may be desirable to fragment the target polynucleotides. Fragmentation improves hybridization by minimizing secondary structure and cross-hybridization to other nucleic acid target polynucleotides in the sample or noncomplementary nucleic acid probes. Fragmentation can be performed by mechanical, enzymatic or chemical means.

[0139] The target polynucleotides may be labeled with one or more labeling moieties to allow for detection of hybridized probe/target polynucleotide complexes. The labeling moieties can include compositions that can be detected by spectroscopic, photochemical, biochemical, bioelectronic, immunochemical, electrical, optical or chemical means. The labeling moieties include radioisotopes, such as ³²P, ³³P or ³⁵S, chemilumninescent compounds, labeled binding proteins, heavy metal atoms, spectroscopic markers, such as fluorescent markers and dyes, magnetic labels, linked enzymes, mass spectrometry tags, spin labels, electron transfer donors and acceptors, and the like. In a preferred embodiment, a fluorescent dye is incorporated directly by using a fluorochrome conjugated nucleotide triphosphate (e.g. Cy3-dUTP) or through a secondary coupling reaction by first incorporating an amino allyl conjugated nucleotide triphosphate (e.g. amino allyl-dUTP) followed by chemical coupling of the fluorochrome (e.g. NHS-Cy3).

[0140] Exemplary dyes include quinoline dyes, triarylmethane dyes, phthaleins, azo dyes, cyanine dyes and the like. Preferably, fluorescent markers absorb light above about 300 nm, preferably above 400 nm, and usually emit light at wavelengths at least greater than 10 nm above the wavelength of the light absorbed. Specific preferred fluorescent markers include fluorescein, phycoerythrin, rhodamine, lissamine, and Cy3 and Cy5 available from Amersham Pharmacia Biotech (Piscataway, N.J.).

[0141] Labeling can be carried out during an amplification reaction, such as polymerase chain and in vitro transcription reactions, or by nick translation or 5′ or 3′-end-labeling reactions. In one case, labeled nucleotides are used in an in vitro transcription reaction. When the label is incorporated after or without an amplification step, the label is incorporated by using terminal transferase or by kinasing the 5′ end of the target polynucleotide and then incubating overnight with a labeled oligonucleotide in the presence of T4 RNA ligase.

[0142] Alternatively, the labeling moiety can be incorporated after hybridization once a probe/target complex has formed. In one case, biotin is first incorporated during an amplification step as described above. After the hybridization reaction, unbound polynucleotides are rinsed away so that the only biotin remaining bound to the substrate is that attached to target polynucleotides that are hybridized to the nucleic acid probes. Then, an avidin-conjugated fluorophore, such as avidin-phycoerythrin, that binds with high affinity to biotin is added. In another case, the labeling moiety is incorporated by intercalation into preformed target/polynucleotide probe complexes. In this case, an intercalating dye such as a psoralen-linked dye can be employed.

[0143] Under some circumstances it may be advantageous to immobilize the target polynucleotides on a substrate and have the nucleic acid probes bind to the immobilized target polynucleotides. In such cases the target polynucleotides can be attached to a substrate as described above.

[0144] Hybridization causes a denatured nucleic acid probe and a denatured complementary target polynucleotide to form a stable duplex through base pairing. Hybridization methods are well known to those skilled in the art (See, for example, Laboratory Techniques in Biochemistry and Molecular Biology, Vol. 24: Hybridization With Nucleic Acid Probes, P. Tijssen, ed. Elsevier, New York, N.Y. (1993)). Conditions can be selected for hybridization where exactly complementary target and nucleic acid probe can hybridize, i.e., each base pair must interact with its complementary base pair. Alternatively, conditions can be selected where target and probes have mismatches but are still able to hybridize. Suitable conditions can be selected, for example, by varying the concentrations of salt or formamide in the prehybridization, hybridization and wash solutions, or by varying the hybridization and wash temperatures.

[0145] Hybridization can be performed at low stringency with buffers, such as 6×SSPE with 0.005% Triton X-100 at 37° C., which permits hybridization between target and polynucleotide probes that contain some mismatches to form target polynucleotide/probe complexes. Subsequent washes are performed at higher stringency with buffers, such as 0.5×SSPE with 0.005% Triton X-100 at 50° C., to retain hybridization of only those target/probe complexes that contain exactly complementary sequences. Alternatively, hybridization can be performed with buffers, such as 5×SSC/0.2% SDS at 60° C., and washes performed in 2×SSC/0.2% SDS and then in 0.1×SSC. Stringency can also be increased by adding agents such as formamide. Background signals can be reduced by the use of detergent, such as sodium dodecyl sulfate, Sarcosyl or Triton X-100, or a blocking agent, such as sperm DNA or bovine serum albumin (BSA).

[0146] In a preferred embodiment, nucleic acid probes of the invention hybridize specifically to target polynucleotides of interest under conditions of high stringency. As used herein, “conditions of high stringency” or “high stringent hybridization conditions” means any conditions in which hybridization will occur when there is at least about 95%, preferably about 97 to 100%, nucleotide complementarity (identity) between the nucleic acids (e.g., a polynucleotide of interest and a nucleic acid probe). Generally, high stringency conditions are selected to be about 5° C. to 20° C. lower than the thermal melting point (Tₘ) for the specific sequence at a defined ionic strength and pH. Appropriate high stringent hybridization conditions include, e.g., hybridization in a buffer such as, for example, 6×SSPE-T (0.9 M NaCl, 60 mM NaH₂PO₄, 6 mM EDTA and 0.05% Triton X-100) for between about 10 minutes and about at least 3 hours (in a preferred embodiment, at least about 15 minutes) at a temperature ranging from about 4° C. to about 37° C.). In a most preferred embodiment, hybridization under high stringent conditions is carried out in 5×SSC, 50% dionized Formamide, 0.1% SDS at 42° C. overnight.

[0147] Hybridization specificity can be evaluated by comparing the hybridization of specificity-control nucleic acid probes to specificity-control target polynucleotides that are added to a sample in a known amount. The specificity-control target polynucleotides may have one or more sequence mismatches compared with the corresponding nucleic acid probes. In this manner, whether only complementary target polynucleotides are hybridizing to the nucleic acid probes or whether mismatched hybrid duplexes are forming is determined.

[0148] Hybridization reactions can be performed in absolute or differential hybridization formats. In the absolute hybridization format, target polynucleotides from one sample are hybridized to the probes in an array (e.g., in a microarray format) and signals detected after hybridization complex formation correlate to target polynucleotide levels in a sample. In the differential hybridization format, the differential expression of a set of genes in two biological samples is analyzed. For differential hybridization, target polynucleotides from both biological samples are prepared and labeled with different labeling moieties. A mixture of the two labeled target polynucleotides is added to an array (e.g., a microarray). The array is then examined under conditions in which the emissions from the two different labels are individually detectable. Probes in the array that are hybridized to substantially equal numbers of target polynucleotides derived from both biological samples give a distinct combined fluorescence (Shalon et al. PCT publication WO95/35505). In a preferred embodiment, the labels are fluorescent labels with distinguishable emission spectra, such as a lissamine conjugated nucleotide analog and a fluorescein conjugated nucleotide-analog. In another embodiment Cy3/Cy5 fluorophores (Amersham Pharmacia Biotech) are employed.

[0149] After hybridization, the array (e.g., microarray) is washed to remove nonhybridized polynucleotides and complex formation between the hybridizable array elements and the target polynucleotides is detected. Methods for detecting complex formation are well known to those skilled in the art. In a preferred embodiment, the target polynucleotides are labeled with a fluorescent label and levels and patterns of fluorescence indicative of complex formation are measured. In one embodiment, the measurement is accomplished by fluorescence microscopy, preferably confocal fluorescence microscopy. An argon ion laser excites the fluorescent label, emissions are directed to a photomultiplier and the amount of emitted light detected and quantitated. The detected signal should be proportional to the amount of probe/target polynucleotide complex at each position of the microarray. The fluorescence microscope can be associated with a computer-driven scanner device to generate a quantitative two-dimensional image of hybridization intensity. The scanned image is examined to determine the abundance/expression level of each hybridized target polynucleotide. In another embodiment, the measurement of levels and patterns of fluorescence is accomplished with a fluorescent imaging device, such as a microarray scanner (e.g., Axon scanner with GenePix Pro software). As with the previous measurement method, the measurements can be used to determine the abundance/expression level of each hybridized target polynucleotide.

[0150] In a differential hybridization experiment, target polynucleotides from two or more different biological samples are labeled with two or more different fluorescent labels with different emission wavelengths. Fluorescent signals are detected separately with different photomultipliers set to detect specific wavelengths. The relative abundances/expression levels of the target polynucleotides in two or more samples is obtained.

[0151] Typically, array fluorescence intensities can be normalized to take into account variations in hybridization intensities when more than one array is used under similar test conditions. In a preferred embodiment, individual probe/target complex hybridization intensities are normalized using the intensities derived from internal normalization controls contained on each microarray.

[0152] Other methods for quantitating the amount of an expressed nucleic acid (e.g., an expressed mRNA) corresponding to a molecular marker of interest of the invention will be evident to the skilled worker. For example, any of a variety of quantitative amplification procedures, such as quantitative PCR, can be carried out. Methods for selecting suitable amplification primers, based on the sequences disclosed herein, for optimizing amplification conditions, and for detecting and quantitating the amplified product, are conventional. Some such procedures are discussed herein with reference to amplifying nucleic acid samples in preparation for hybridization assays.

[0153] Other aspects of the invention relate to methods for determining the responsiveness of a rectal adenocarcinoma to radiochemotherapy, comprising detecting the presence of, and/or quantitating the amount of, one or more protein (polypeptide) products whose expression is correlated with the responsiveness. The terms “protein” and “polypeptide” are used interchangeably herein.

[0154] Polypeptides whose expression is measured include those comprising SEQ ID NOs: 59-112.

[0155] The presence or quantity of the protein product in a body fluid, a stool sample, or, preferably, in a tissue or cell sample from the subject, is determined, and compared to a baseline value.

[0156] Methods of preparing samples (e.g., from patients) for polypeptide analysis are conventional and well-known in the art, and a variety of methods known to skilled workers can be used to determine the amount of these proteins. For example, enzymatic activities of the proteins can be measured, using conventional procedures. Alternatively, the proteins can be detected by immunological methods such as, e.g., immunoassays (EIA), radioimmunoassay (RIA), immunofluorescence microscopy, or immunohistochemistry, all of which assay methods are fully conventional. See, e.g., U.S. Pat. No. 6,602,661.

[0157] The invention includes antibodies which are specific for polypeptides comprising SEQ ID NOs: 59-112, or for active variants or fragments of these polypeptides. An “active” variant or fragment of a polypeptide of the invention is one which is able to bind to, or to elicit, an antibody that is specific for a polypeptide corresponding to one of genes 1-54. For example, polypeptides comprising small substitutions, additions, deletions, etc, are tolerated provided they retain the ability to elicit a desired antibody, as are suitable antigenic fragments of the polypeptides. Antigens that exhibit at least about 90% (e.g., at least about 95%, or at least about 98%) sequence identity to a polypeptide comprising one of SEQ ID NOs: 59-112, or to a fragment thereof, are also tolerated. Methods for determining if a polypeptide exhibits a particular percent identity to a polypeptide comprising, e.g., one of SEQ ID NOs: 59-112 are conventional; algorithms such as those discussed elsewhere herein in regard to nucleic acids can be used.

[0158] In a preferred embodiment, antibodies of the invention are immobilized on a surface (e.g., are reactive elements on an array, such as a microarray, or are on another surface, such as used for surface plasmon resonance (SPR)-based technology [e.g., Biacore]), and polypeptides in the sample are detected by virtue of their ability to bind specifically to the antibodies. Methods of preparing the surfaces and performing the analyses are conventional.

[0159] Any of a variety of antibodies can be used in methods of the invention. Such antibodies include, e.g., polyclonal, monoclonal (mAbs), recombinant, humanized or partially humanized, single chain, Fab, and fragments thereof. The antibodies can be of any isotype, e.g., IgM, various IgG isotypes such as IgG₁, IgG₂ₐ, etc., and they can be from any animal species that produces antibodies, including goat, rabbit, mouse, chicken or the like. An antibody “specific for” a polypeptide means that the antibody recognizes a defined sequence of amino acids, or epitope, either present in the full length polypeptide or in a peptide fragment thereof.

[0160] Antibodies can be prepared according to conventional method, which are well known, e.g. Green et al., Production of Polyclonal Antisera, in Immunochemical Protocols (Manson, ed.), (Humana Press 1992); Coligan et al., in Current Protocols in Immunology, Sec. 2.4.1 (1992); Kohler & Milstein (1975), Nature 256, 495; Coligan et al., sections 2.5.1-2.6.7; and Harlow et al., Antibodies: A Laboratory Manual, page 726 (Cold Spring Harbor Laboratory Pub. 1988). Methods of preparing humanized or partially humanized antibodies, and antibody fragments, and methods of purifying antibodies, are conventional.

[0161] The molecular profiling information described herein can be harnessed for the purpose of identifying agents (e.g., drugs) that can enhance (increase, facilitate, potentiate, etc.) the response of a rectal adenocarcinoma to radiochemotherapy. Such agents are particularly useful when administered, as therapeutic agents, in conjunction with radiochemotherapy, in order to enhance the effect of the radiochemotherapy. For example, the agents can be administered to a subject before, during or after radiochemotherapy is carried out. Agents are selected which enhance expression or activity of one or more genes whose up-regulation is correlated with the responsiveness, and/or which decrease expression and/or activity of one or more genes whose down-regulation is correlated with the responsiveness.

[0162] In assays to identify such agents, putative agents are introduced into cells, and either polynucleotide expression or activity levels, or polypeptide expression or activity levels, are measured. The expression and/or activity levels of polynucleotides or polypeptides corresponding to marker genes of the invention are determined. Preferably, the methods are carried out in vitro, with cultured cells or with tumor tissue, and employ high throughput procedures. Candidate agents selected in this manner can then be tested further in vivo.

[0163] In one embodiment, rectal adenocarcinoma cell lines are prepared from tumors that are either responsive or non-responsive to radiochemotherapy, using standard methods, and are profiled using the present methods. Preferred cell lines are those that maintain the expression profile of the primary tumor from which they were derived. One or several such cell lines may be used as a “general” panel; alternatively or additionally, cell lines from individual subjects may be prepared and used. In other embodiments, previously established rectal adenocarcinoma cell lines are used, or non-tumor rectal cells, or cells from other normal tissues, are used. A skilled worker can readily select a suitable cell line to use in the method.

[0164] The molecular alterations in cell line cells contacted with a putative modulatory agent can be measured at the mRNA level (gene expression) applying conventional methods, such as those disclosed herein. Alternatively, one can assay the protein product(s) or activities of the selected gene(s), using conventional procedures. For example, in the case of secreted or cell-surface proteins, expression can be assessed using immunoassay or other immunological methods including enzyme immunoassays (EIA), radioimmunoassay (RIA), immunofluorescence microscopy or flow cytometry. EIAs are described in greater detail in several references (Butler, J E, In: Structure of Antigens, Vol. 1 (Van Regenmortel, M., CRC Press, Boca Raton 1992, pp. 209-259; Butler, J E, “ELISA,” In: van Oss, C. J. et al. (eds), Immunochemistry, Marcel Dekker, Inc., New York, 1994, pp. 759-803; Butler, J E (ed.), Immunochemistry of Solid-Phase Immunoassay, CRC Press, Boca Raton, 1991). RIAs are discussed in Kirkham and Hunter (eds.), Radioimmune Assay Methods, E. & S. Livingstone, Edinburgh, 1970. Preferably, polypeptide samples are contacted with antibody compositions of the invention that are in the form of an array, such as a microarray, and are analyzed as described elsewhere herein.

[0165] Without wishing to be bound by any particular mechanism, it is suggested that, among the types of agents that can be tested and identified as therapeutic agents are, e.g., agents that (1) act on a cellular pathway that inhibits or stimulates expression of a gene of interest, (2) act directly on the protein product, or (3) bypass the step in a cellular pathway mediated by the product of this gene.

[0166] A variety of types of agents can be tested and identified as the desired agents.

[0167] For example, one can utilize known properties of a target protein to devise agents to stimulate or inhibit its production or activity, as desired. That is, one can devise a means to inhibit the action of, or bind, block, remove or otherwise diminish the presence, activity and/or availability of, a protein whose down-regulation is associated with responsiveness to radiochemotherapy; or one can devise a means to stimulate the action of, or to potentiate or enhance the activity of or availability of, a protein whose up-regulation is associated with such responsiveness. For example, in the case of a cellular receptor, one could expose the receptor to an antagonist, a soluble form of the receptor or a “decoy” ligand binding site of a receptor (to compete for ligand) (Gershoni J M et al., (1988) Proc Natl Acad Sci USA 85, 4087-9; U.S. Pat. No. 5,770,572) to inhibit it.

[0168] Antibodies may be administered to a cell to bind and inactivate (or compete with), or to enhance the activity of, secreted protein products or expressed cell-surface products of genes of interest.

[0169] Another approach is to employ antisense oligonucleotides or nucleic acid constructs that inhibit expression of a gene whose down-regulation is desired, in a highly specific manner. Methods to select, test and optimize putative antisense sequences are routine. In one embodiment, nucleic acid constructs are used to express an antisense molecule of interest. Methods to operatively link appropriate antisense sequences to an appropriate regulatory element, e.g., a promoter, such as a strong promoter, an inducible strong promoter, or the like. Inducible promoters include, e.g., an estrogen inducible system (Braselmann et al. (1993) Proc Natl Acad Sci USA 90, 1657-1661). Also known are repressible systems driven by the conventional antibiotic, tetracycline (Gossen et al., (1992) Proc. Natl. Acad. Sci. USA 89, 5547-5551).

[0170] In another embodiment of inhibition by antisense, antisense oligonucleotides are administered to a cell. The oligonucleotides can be DNA or RNA or chimeric mixtures or derivatives or modified versions thereof, single-stranded or double-stranded. The oligonucleotides can be modified at the base moiety, sugar moiety, or phosphate backbone (as discussed above). The oligonucleotide may include other appending groups such as peptides, or agents facilitating transport across the cell membrane (see, e.g. Letsinger et al. (1989) Proc. Natl. Acad. Sci. USA 84, 684-652; PCT Publication WO 88/09810 (1988)), hybridization-triggered cleavage agents (e.g. Krol et al. (1988), BioTechniques 6, 958-976) or intercalating agents (e.g., Zon (1988), Pharm. Res 5, 539-549).

[0171] Multiple antisense constructs or oligonucleotides specific for different genes can be employed together. The sequences of the downregulated genes described herein can be used to design the antisense molecules (Hambor et al., (1988) J. Exp. Med. 168, 1237-1245; Holt et al., (1986) Proc. Nat'l. Acad. Sci. 83, 4794-4798; Izant et al., (1984) Cell 36, 1007-1015); Izant et al., (1985) Science 229, 345-352; De Benedetti et al., (1987) Proc. Natl. Acad. Sci. USA, 84, 658-662). The antisense sequences may range from about 6 to about 50 nucleotides, and may be as large as 100 or 200 nucleotides, or larger. They may correspond to full-length coding sequences and/or may be genomic sequences that comprise non-coding sequences.

[0172] Another approach is to use ribozymes that can specifically cleave nucleic acids encoding the overexpressed genes of the invention. Such methods are routine in the art and methods of making and using any of a variety of appropriate ribozymes are well known to the skilled worker. For reviews on ribozymes see e.g., Ohkawa et al. (1995) J. Biochem. 118, 251-258; Sigurdsson et al. (1995) Trends Biotechnol. 13, 286-289; Rossi, J. J. (1995) Trends Biotechnol. 13, 301-306; Kiehntopf et al. (1995) J. Mol. Med. 73, 65-71). A ribozyme having specificity for an mRNA of interest can be designed based upon the nucleotide sequence of, e.g., the corresponding cDNA. For example, a derivative of a Tetrahymena L-19 IVS RNA can be constructed in which the base sequence of the active site is complementary to the base sequence to be cleaved in an mRNA corresponding to one of the overexpressed genes of the invention. See for example U.S. Pat. Nos. 4,987,071 and 5,116,742, both by Cech et al. Alternatively, the sequence of an overexpressed gene of the invention can be used to select a catalytic RNA having a specific ribonuclease activity from a pool of RNA molecules. See for example Bartel et al. (1993) Science 261, 1411-1418.

[0173] Another approach involves double stranded RNAs called small interfering RNAs. An siRNA is a double-stranded RNA molecule comprising self-complementary sense and antisense regions, wherein the antisense region comprises nucleotide sequence that is complementary to nucleotide sequence in a target nucleic acid molecule or a portion thereof, and the sense region has a nucleotide sequence corresponding to the target nucleic acid sequence or a portion thereof. The siRNA can be assembled from two separate oligonucleotides, where one strand is the sense strand and the other is the antisense strand, wherein the antisense and sense strands are self-complementary. The siRNA can be assembled from a single oligonucleotide, where the self-complementary sense and antisense regions of the siRNA are linked by means of a nucleic acid based or non-nucleic acid-based linker(s). The siRNA can be a polynucleotide with a hairpin secondary structure, having self-complementary sense and antisense regions. The siRNA can be a circular single-stranded polynucleotide having two or more loop structures and a stem comprising self-complementary sense and antisense regions, wherein the circular polynucleotide can be processed either in vivo or in vitro to generate an active siNA molecule capable of mediating RNAi. In certain embodiments, the siNA molecule of the invention comprises separate sense and antisense sequences or regions, wherein the sense and antisense regions are covalently linked by nucleotide or non-nucleotide linkers molecules as is known in the art, or are alternately non-covalently linked by ionic interactions, hydrogen bonding, van der waals interactions, hydrophobic interactions, and/or stacking interactions.

[0174] RNAi molecules can be used to inhibit gene expression, using conventional procedures. Typical method to design, make and use interfering RNA molecules are described, e.g., in U.S. Pat. No. 6,506,559, Lau et al. (2003) Scientific American, pp. 34-41; McManus et al. (2002) Nature Reviews Genetics 3, 737-747; Dykxhoorn et al. (2003) Nature Reviews Molecular Cell Biology 4, 457-467; Allshire (2002) Science 297, 1818-1819; Volpe et al. (2002) Science 297, 1833-1837; Jenuwein (2002) Science 297, 2215-2218; Hall et al. (2002) Science 297 2232-2237; Hutvagner et al. (2002) Science 297, 2056-60; McManus et al. (2002) RNA 8, 842-850; Reinhart et al. (2002) Gene & Dev. 16, 1616-1626; Reinhart et al. (2002) Science 297, 1831; Fire et al. (1998) Nature 391, 806-811, Moss (2001) Curr Biol 11, R772-5, Brummelkamp et al. (2002) Science 296, 550-3; Bass (2001) Nature 411 428-429; and Elbashir et al. (2001) Nature 411, 494-498; U.S. Pat. No. 6,506,559; US patent application 20030206887; and PCT applications WO99/07409, WO99/32619, WO 00/01846, WO 00/44914, WO00/44895, WO01/29058, WO01/36646, WO01/75164, WO01/92513, WO 01/29058, WO01/89304, WO01/90401, WO02/16620, and WO02/29858.

[0175] For guidance on methods to design interfering RNA molecules, see, e.g., Vickers et al. (2003) J Biol Chem 278, 7108-7118 and Yang et al. (2003) Proc Natl Acad Sci USA 99, 9942-9947. For methods to make siRNAs, see e.g. Tuschl et al. (1999) Genes & Dev. 13, 3191-3197; Kawasaki et al. (2003) Nucleic Acids Res 31, 700-707; Miyagishi et al. (2003) Nature Biotechnol 20, 497-500; Lee et al. (2002) Nature Biotechnol 20, 500-505, Brummelkamp et al. (2002) Science 296, 550-553; McManus et al. (2002) RNA 8, 842-850; Paddison et al. (2002a) Gene Dev 16, 948-958; Paddison et al. (2002b) Proc Natl Acad Sci USA 99, 1443-1448); Paul et al. (2002) Nature Biotechnol 20, 505-508; Sui et al. (2002) Proc Natl Acad Sci USA 99, 5515-5520; and Yu et al. (2002) Proc Natl Acad Sci USA 99, 6047-6052. For methods to use siRNAs to inhibit expression, see e.g. Hannon (2002) Nature 418, 244-251; Bernstein et al. (2002) RNA 7, 1509-1521; Hutvagner et al., Curr. Opin. Genetics & Development 12, 225-232; Brummelkamp (2002) Science 296, 550-553; Lee et al. (2002) Nature Biotechnol 20, 500-505; Miyagishi et al. (2002) Nature Biotechnol. 20, 497-500; Paddison et al. (2002) Genes & Dev 16, 948-958; Paul et al. (2002) Nature Biotechnol. 20, 505-508; Sui et al. (2002) Proc. Natl. Acad. Sci. USA 99, 5515-5520; and Yu et al. (2002) Proc. Natl. Acad. Sci. USA 99, 6047-6052.

[0176] Another approach is to use small molecules (sometimes referred to herein as “compounds”). They may be isolated from natural sources or developed synthetically, e.g., by combinatorial chemistry. In general, such molecules are identified from large libraries of natural products or synthetic (or semi-synthetic) extracts or chemical libraries according to methods known in the art. Those skilled in the field of drug discovery and development will understand that the precise source of test extracts or compounds is not critical to the methods of the invention. Accordingly, virtually any number of chemical extracts or compounds can be used in the methods described herein. Examples of such extracts or compounds include, but are not limited to, plant-, fungal-, prokaryotic- or animal-based extracts, fermentation broths, and synthetic compounds, as well as modification of existing compounds. Numerous methods are also available for generating random or directed synthesis (e.g., semi-synthesis or total synthesis) of any number of chemical compounds, including, but not limited to, saccharide-, lipid-, peptide-, polypeptide- and nucleic acid-based compounds. Synthetic compound libraries are commercially available, e.g., from Brandon Associates (Merrimack, N.H.) and Aldrich Chemical (Milwaukee, Wis.).

[0177] Alternatively, libraries of natural compounds in the form of bacterial, fungal, plant, and animal extracts are commercially available from a number of sources, e.g., Biotics (Sussex, UK), Xenova (Slough, UK), Harbor Branch Oceangraphics Institute (Ft. Pierce, Fla.), and PharmaMar, U.S.A. (Cambridge, Mass.). In addition, natural and synthetically produced libraries are generated, if desired, according to methods known in the art, e.g., by standard extraction and fractionation methods. Furthermore, if desired, any library or compound is readily modified using standard chemical, physical, or biochemical methods.

[0178] Once a molecule has been identified in vitro as a candidate agent that increases the responsiveness of a rectal adenocarcinoma to radiochemotherapy, one can further determine in vivo if the candidate does, in fact, increase the responsiveness in a subject. Furthermore, if a candidate agent is shown to inhibit or stimulate expression or activity of several genes whose expression is correlated with the responsiveness, one can inhibit or stimulate the expression of each of the genes individually, in vivo, in order to determine those genes whose expression is correlated to the responsiveness.

[0179] The candidate agent(s) can be introduced into any suitable animal model for rectal carcinoma. Eventually, agents that have been shown to be safe and effective in animal models can be tested and used in human patients.

[0180] Methods for introducing agents into cells or animals are conventional. For example, methods of gene transfer can be used, wherein antisense molecules, ribozymes, or siRNAs are introduced into a rectal adenocarcinoma cell, tissue or organ of interest, or nucleic acids that encode proteins which modulate (up-regulate or down-regulate) the production or activity of one or more of the genes of the invention are so introduced. Methods of gene transfer are conventional, and include virus-mediated gene transfer, for example, with retroviruses (Nabel et al. (1989) Science 244, 1342), lentiviruses, and recombinant adenovirus vectors (Horowitz, M. S., In: Virology, Fields, B N et al, eds, Raven Press, New York, 1990, p. 1679, or current edition; Berkner (1988) Biotechniques 6, 616-29, Strauss, S E, In: The Adenoviruses, Ginsberg, H S, ed., Plenum Press, New York, 1984, or current edition). Adeno-associated virus (AAV) can also be used (Samulski et al. (1991) EMBO J. 10, 3941 (1991); Lebkowski et al. (1988) Mol. Cell. Biol. 8, 3988-3996; Kotin et al. (1990), Proc. Natl. Acad. Sci. USA 87, 2211-2215; Hermonat et al. (1984), J. Virol. 51, 329-339). Improved efficiency is attained by the use of promoter enhancer elements in the DNA constructs (Philip et al. (1993), J. Biol. Chem. 268, 16087-16090).

[0181] In addition to virus-mediated gene transfer, physical means well-known in the art can be used for direct gene transfer, including administration of plasmid DNA (Wolff et al., 1990, supra) and particle-bombardment mediated gene transfer, originally described in the transformation of plant tissue (Klein et al. (1987), Nature 327, 70 (1987); Christou, et al. (1990), Trends Biotechnol. 6, 145) but also applicable to mammalian tissues in vivo, ex vivo or in vitro (Yang et al. (1990), Proc. Natl. Acad. Sci. USA 87, 9568 (1990); Williams et al. (1991), Proc. Natl. Acad. Sci. USA 88, 2726; Zelenin et al. (1991), FEBS Lett. 280, 94; Zelenin et al. (1989), FEBS Lett. 244, 65; Johnston et al (1991), In Vitro Cell. Dev. Biol. 27, 11). Furthermore, electroporation or calcium phosphate transfection, both well-known means to transfer genes into cell in vitro, can also be used to transfer DNA molecules according to the present invention to tissues in vivo (Pear et al. (1993) Proc. Natl. Acad. Sci. USA 90, 8392; Titomirov et al. (1991), Biochim. Biophys. Acta 1088, 131).

[0182] Gene transfer can also be achieved using “carrier mediated gene transfer” (Wu et al. (1989), J. Biol. Chem. 264, 16985; Wu et al. (1988), J. Biol. Chem. 263, 14621; Soriano et al. (1983), Proc. Natl. Acad. Sci. USA 80, 7128; Wang et al. (1982), Proc. Natl. Acad. Sci. USA 84, 7851; Wilson et al. (1992), J. Biol. Chem. 267, 963). Preferred carriers are targeted liposomes (Nicolau et al. (1983), Proc. Natl. Acad Sci. USA 80, 1068 (1983); Soriano et al., supra) such as immunoliposomes, which can incorporate acylated monoclonal antibodies into the lipid bilayer (Wang et al., supra), or polycations such as asialoglycoprotein/polylysine (Wu et al., 1989, supra). Liposomes have been used to encapsulate and deliver a variety of materials to cells, including nucleic acids and viral particles (Faller et al (1984), J. Virol. 49, 269-272).

[0183] Preformed liposomes that contain synthetic cationic lipids form stable complexes with polyanionic DNA (Felgner et al. (1987), Proc. Natl. Acad. Sci. USA 84, 7413-7417). Cationic liposomes, liposomes comprising some cationic lipid, that contained a membrane fusion-promoting lipid dioctadecyldimethyl-ammonium-bromide (DDAB) have efficiently transferred heterologous genes into eukaryotic cells (Rose et al. (1991), Biotechniques 10, 520-525). Cationic liposomes can mediate high level cellular expression of transgenes, or mRNA, by delivering them into a variety of cultured cell lines (Malone et al. (1989), Proc. Natl. Acad. Sci. USA 86, 6077-6081).

[0184] Another embodiment of the invention is a method for identifying a gene whose inhibition (e.g., inhibition of nucleic acid expression or activity, or inhibition of polypeptide synthesis or activity) enhances the response of a rectal tumor to radiochemotherapy. For example, one can test one or more of the genes of the invention whose over-expression is correlated with responsiveness of a rectal adenocarcinoma to radiochemotherapy (e.g., genes 1-41). The method can be carried out in vitro, but is preferably carried out in vivo, in a suitable animal model. In one embodiment, the method comprises:

[0185] a. inhibiting (completely or partially, using agents such as those discussed elsewhere herein) in a rectal adenocarcinoma the expression and/or activity of a polynucleotide corresponding to one of genes 1-41 (e.g., a polynucleotide that hybridizes specifically to a nucleic acid comprising one of SEQ ID NOs: 1-41 or 113-119, and/or to a fragment that comprises at least about 15 contiguous nucleotides of one of those sequences; or to a complement of one of those fragments); or inhibiting the synthesis and/or activity of a polypeptide corresponding to one of genes 1-41 (e.g., a polypeptide that binds specifically to an antibody of the invention, such as an antibody specific for one of polypeptides comprising SEQ ID NOs: 59-101, and/or for an antigenic fragment of one of those polypeptides), and

[0186] b. determining if the rectal adenocarcinoma exhibits an increased response to radiochemotherapy, compared to the response in the absence of the inhibition.

[0187] Another embodiment of the invention is a method for identifying a gene whose stimulation (e.g., stimulation of nucleic acid expression or activity, or stimulation of polypeptide synthesis or activity) enhances the response of a rectal tumor to radiochemotherapy, comprising:

[0188] a. stimulating (completely or partially, using agents such as those discussed elsewhere herein) in a rectal adenocarcinoma the expression and/or activity of a polynucleotide corresponding to one of genes 42-54 (e.g., a polynucleotide that hybridizes specifically to a nucleic acid comprising one of SEQ ID NOs: 46-58 or 120-123, and/or to a fragment that comprises at least about 15 contiguous nucleotides of one of those sequences, or to a complement of one of those nucleic acids or fragments); or inhibiting the synthesis and/or activity of a polypeptide corresponding to one of genes 42-54 (e.g., a polypeptide that binds specifically to an antibody of the invention, such as an antibody specific for a polypeptide comprising one of SEQ ID NOs: 102-112, and/or for an antigenic fragment of one of those polypeptides), and

[0189] b. determining if the rectal adenocarcinoma exhibits an increased response to radiochemotherapy, compared to the response in the absence of the stimulation.

[0190] Other aspects of the invention are kits suitable for performing any of the methods of the invention.

[0191] One embodiment of the invention is a kit for detecting the presence and/or amount of a polynucleotide in a sample from a rectal adenocarcinoma, which may indicate that the rectal adenocarcinoma is responsive to radiochemotherapy, comprising a composition of nucleic acids of the invention (e.g., in the form of an array) and, optionally, one or more reagents that facilitate hybridization of the nucleic acids in the composition to a test polynucleotide of interest, and/or that facilitate detection of the hybridized polynucleotide(s), e.g., that facilitate detection of fluorescence. The kit may comprise a composition of nucleic acids of the invention (e.g., in the form of an array), means for carrying out hybridization of the nucleic acids in the array to a test polynucleotide(s) of interest, and means for reading hybridization results. Hybridization results may be units of fluorescence.

[0192] Another embodiment is a kit for detecting the presence and/or amount of a polypeptide in a sample from a rectal adenocarcinoma, which may indicate that the rectal adenocarcinoma is responsive to radiochemotherapy, comprising a composition of antibodies of the invention (e.g., in the form of an array) and, optionally, one or more reagents that facilitate binding of the antibodies in the composition with a test protein(s) of interest, or that facilitate detection of bound antibody. The kit may comprise a composition of antibodies of the invention (e.g., in the form of an array or a Biacore chip), means for carrying out binding of the antibodies in the array to a test polypeptide(s) of interest, and means for reading the binding results.

[0193] Kits of the invention may comprise instructions for performing a method, such as a diagnostic method. Other optional elements of a kit of the invention include suitable buffers, media components, or the like; a computer or computer-readable medium for storing and/or evaluating the assay results; containers; or packaging materials. Reagents for performing suitable controls may also be included. The reagents of the kit may be in containers in which the reagents are stable, e.g., in lyophilized form or stabilized liquids. The reagents may also be in single use form, e.g., in single reaction form for diagnostic use.

[0194] The present invention also relates to combinations of the invention in which the nucleic acid or protein sequences of the invention are represented, not by physical molecules, but by computer-implemented databases. For example, the present invention relates to electronic forms of polynucleotides, polypeptides, antibodies, etc., of the present invention, including a computer-readable medium (e.g., magnetic, optical, etc., stored in any suitable format, such as flat files or hierarchical files) which comprise such sequences, or fragments thereof, e-commerce-related means, etc. An investigator may, e.g., compare an expression profile exhibited by a rectal adenocarcinoma sample of interest to an electronic form of one of the expression profiles of the invention, and may thereby determine its responsiveness to radiochemotherapy.

[0195] Having now generally described the invention, the same will be more readily understood through reference to the following examples which are provided by way of illustration, and are not intended to be limiting of the present invention, unless specified. In the foregoing and in the following examples, all temperatures are set forth uncorrected in degrees Celsius; and, unless otherwise indicated, all parts and percentages are by weight.

### EXAMPLES

### Example I

### Patients and Methods

### A. Selection of Patients and Response Classification

[0196] All patients are participants in a multicenter, randomized prospective phase III clinical trial (CAO/ARO/AIO-94, German Rectal Cancer Trial) aimed at determining the relative benefits of preoperative (neoadjuvant) versus postoperative (adjuvant) radiochemotherapy (Sauer et al. (2001) Strahlenther Onkol 177, 173-81). For the study here, we collected biopsies from 23 patients between December 2001 to October 2002 who were assigned to the neoadjuvant treatment arm adhering to the guidelines set by the local ethical review board. Pre-therapeutic staging was performed including complete medical history and physical evaluation, digital rectal examination, endorectal ultrasound, rigid rectoscopy with two tumor biopsies, colonoscopy, abdominal ultrasound, abdominal and pelvic computed tomography and chest X-ray. Endoscopic ultrasound was performed by two experienced surgeons and was based on the degree of tumor infiltration through the rectal wall (T-level) according to standard criteria (Liersch et al. (2003) Chirurg 74, 224-34; Adams et al. (1999) Dis Colon Rectum 42, 159-66; Glaser et al. (1990) Br J Surg 77, 883-7; Hunerbein et al. (2001) Eur J Ultrasound 13, 17-23). Only patients with uT-level 3 (n=22) and uT-level 4 (n=1) carcinomas located within 16 cm from the anocutaneous verge were included. The majority of the patients were diagnosed with uUICC III (n=16) carcinomas, and only seven patients were diagnosed as uUICC II. Two pre-therapeutical biopsies were taken from representative, adjacent areas of the tumors one of which was examined by one pathologist. All rectal cancers were histologically diagnosed as adenocarcinomas. The second biopsy was used for RNA extraction. All 23 patients randomly assigned to the neoadjuvant arm received a total dose of 50.4 Gy of radiation accompanied by 5-fluorouracil (5-FU, 1000 mg per m², days 1-5 and days 28-33) intravenous application. Details of the preoperative treatment modalities were described previously (Sauer et al. (2001) Strahlenther Onkol 177, 173-81). Standardized surgery was performed including total mesorectal excision (TME, (Heald et al. (1986) Lancet 1, 1479-82)) after an interval of approximately five weeks after radiochemotherapy. The histological workup of surgical specimens was performed according to UICC standards (Sobin L H, Wittekind C. UICC: TNM classification of malignant tumors. 5 ed. New York: John Wiley & Sons, 1997). Tumor response was assessed based on T-level down-sizing (as performed by rectal ultrasound before radiochemotherapy and histomorphologically after surgery). Down-sizing was defined as the reduction of tumor infiltration for at least one T-level. The experimental design is summarized in FIG. 1. We have chosen the T-level classification as the international standard for rectal cancer staging. The clinical data and details of the response classification are summarized in Table 1. Additionally, three matched pairs of preoperative biopsies and resected tumor specimens from patients of the adjuvant treatment arm were analyzed to establish the degree of similarity of the bioptic material and resected specimen.

TABLE 1

| Tumor | | | | | | | | ypN | | | |
|---|---|---|---|---|---|---|---|---|---|---|---|
| Samples | uT | ypT | uUICC | ypUICC | uN | ypN | ypN total | infiltrated | M | ypGrading | R |
| P1 | 3 | 0 | II | 0 | 0 | 0 | 18 | 0 | 0 | x | 0 |
| P2 | 3 | 0 | III | 0 | 1 | 0 | 27 | 0 | 0 | x | 0 |
| P3 | 3 | 0 | II | 0 | 0 | 0 | 16 | 0 | 0 | x | 0 |
| P4 | 3 | 2 | III | I | 1 | 0 | 22 | 0 | 0 | 2 | 0 |
| P5 | 3 | 1 | II | I | 0 | 0 | 20 | 0 | 0 | 2 | 0 |
| P6 | 3 | 2 | III | I | 1 | 0 | 24 | 0 | 0 | 2 | 0 |
| P7 | 3 | 1 | II | II | 0 | 0 | 18 | 0 | 0 | 2 | 0 |
| P8 | 4 | 3c | III | III | 0 | 1 | 19 | 3 | 0 | 3 | 0 |
| P9 | 3 | 2 | II | I | 0 | 0 | 16 | 0 | 0 | 3 | 0 |
| P10 | 3 | 3b | III | III | 1 | 1 | 30 | 1 | 0 | 2 | 0 |
| P11 | 3 | 3b | III | II | 1 | 0 | 15 | 0 | 0 | 2 | 0 |
| P12 | 3 | 3b | II | III | 0 | 0 | 8 | 1 | 0 | 3 | 0 |
| P13 | 3 | 3b | III | III | 1 | 1 | 27 | 1 | 0 | 2 | 0 |
| P14 | 3 | 4a | III | III | 1 | 1 | 19 | 1 | 0 | 2 | 0 |
| P15 | 3 | 3b | III | II | 1 | 0 | 28 | 0 | 0 | 2 | 0 |
| P16 | 3 | 3a | III | II | 1 | 0 | 21 | 0 | 0 | 2 | 0 |
| P17 | 3 | 3b | III | III | 1 | 1 | 19 | 2 | 0 | 3 | 0 |
| P18 | 3 | 4a | III | III | 1 | 1 | 21 | 2 | 0 | 2 | 0 |
| P19 | 3 | 3c | III | II | 1 | 0 | 24 | 0 | 0 | 3 | 0 |
| P20 | 3 | 3c | II | II | 0 | 0 | 16 | 0 | 0 | 2 | 0 |
| P21 | 3 | 3c | III | II | 1 | 0 | 17 | 0 | 0 | 2 | 0 |
| P22 | 3 | 3a | III | II | 1 | 0 | 14 | 0 | 0 | 2 | 0 |
| P23 | 3 | 4a | III | III | 1 | 1 | 22 | 1 | 0 | 2 | 0 |

### Therapy response and clinical data of 23 patients included in this study.

[0197] uT, T-level determined by rectal ultrasound; ypT, T-level by histopathological assessment; uUICC, UICC stage by ultrasound; ypUICC, UICC stage by histopathological assessment; uN, lymph node status by ultrasound; ypN, lymph node status by histopathological assessment; ypN total, complete number of analyzed lymph nodes; ypN infiltrated, number of affected lymph nodes; M, distant metastasis; ypGrading, tumor grading by histopathological assessment; R, resectability (O refers to histologically tumor free surgical margins). u: before any treatment, yp: histopathological assessment after neodadjuvant treatment.

### B. RNA Isolation and Expression Profiling

[0198] Following rectal ultrasound, tumor biopsies were ascertained and stored for later isolation of RNA (Ambion, Austin, Tex.). Tumor material was in the range of 5 mg to 80 mg. RNA extraction was performed using TRIZOL (Invitrogen, Carlsbad, Calif.) following standard procedures. High-quality RNA could be successfully extracted from all samples. In order to generate enough RNA for repeat hybridizations, mRNA was amplified using the RiboAmp RNA amplification kit (Arcturus, Mountain View, Calif.), which resulted in antisense mRNA amounts that averaged 40 μg. cRNA was reverse transcribed into cDNA incorporating aminoallyl-dUTP. Labeled cDNA was purified using Qiagen columns (QIAquick, PCR purification kit, Qiagen, Los Angeles, Calif.), followed by chemical coupling of Cy3 (Amersham, Piscataway, N.J.). Control cRNA was generated by amplification of a universal human reference mRNA pool (Stratagene, La Jolla, Calif.; catalogue number 740000) and labeled as above using Cy5 (Amersham). RNA quantification and labeling efficiency was determined using the Nanodrop quantification device (Nanodrop, Rockland, Del.). Expression profiling was carried out on the NCI-cDNA arrays (9984 genes) as follows: 3.0 μg of Cy3 labeled test cDNA and 3.0 μg of Cy5 labeled control cDNA were hybridized at 42° C. overnight in specifically designed hybridization cassettes (TeleChem International, Inc., Sunnyvale, Calif.). After hybridization, slides were washed and scanned on an Axon scanner using GenePixPro (3.0) software (Axon Instruments, Inc., Union City, Calif.). Background subtraction and normalization was performed when submitting the data to the CIT/NIH-microarray database, mAdb (web site nciarray.nih.gov). Spot quality was assessed according to criteria in GenePixPro (3.0) software. Spots with a small size or low intensity in both the red and green channels were eliminated, as were genes with more than 50% of missing data. This a priori filtering to remove genes with unreliable signals resulted in a final tally of 9059 genes. For each patient sample two independent hybridizations were performed. Correlation coefficients of the technical repeat hybridizations were greater than 0.95, with one exception (P1, correlation coefficient of 0.87).

### C. Statistical Analysis

[0199] All statistical analyses were done on the BRBArrayTools package for micro-array analysis developed at the Biometric Research Branch of the National Cancer Institute (Simon R, Peng A. BRB ArrayTools, 2003). BRBArrayTools can be obtained from the web site linus.nci.nih.gov/BRB-ArrayTools.html. Technical replicate expression profiles of the same tumor specimen were highly consistent and were averaged for analysis. A class comparison analysis was applied to determine which genes were differentially expressed between the two classes. For this we used a two-sample T-test with a randomized variance model (Wright G, Simon R. A random variance model for differential gene detection in small sample microarray experiments, 2003.Tech. Rep. 013, Biometric Research Branch, National Cancer Institute, at the web site linus.nci.nih.gov/˜brb/TechReport.htm. The randomized variance model assumes that the variance of the expression of each gene is randomly drawn from an inverse-gamma distribution. For a small number of samples, this gives better results than assigning equal variance to all genes or attempting to estimate the variances separately for each gene.

[0200] We applied six different classification methods to predict response: Compound Covariate Predictor (Radmacher et al. (2002) J Comput Biol 9, 505-11), Diagonal Linear Discriminant Analysis (Dudoit et al. (2002) Journal of the American Statistical Association, 77-87), 1 and 3-Nearest Neighbor classifiers (Devroye, L, Gyorfi L, G. Lugosi. A probabilistic theory of pattern recognition. New York: Springer, 1996), Nearest Centroid classifier and Support Vector Machine (Vapnik V N. Statistical learning theory. New York: John Wiley & Sons, Inc., 1998). The genes that are differentially expressed at a p<0.001 level were used as predictive features in the classifiers. A leave-one-out cross-validation (LOOCV) was employed to estimate the prediction accuracy for each classification method. With LOOCV one sample is left out and the remaining samples are used to build a classifier, which would then be used to classify the left out sample. Both feature selection and classifier design was repeated each time a sample was left out. The fraction of samples that are classified correctly is an estimate of the classification accuracy.

[0201] The significance of the classification results are calculated by permuting the class labels of the samples and then finding the fraction of times this re-labeling resulted in higher LOOCV classification accuracy. The method is described in detail in Radmacher et al. (Radmacher et al. (2002) J Comput Biol 9, 505-11).

### Example II

### Identification of Genes Whose Expression is Correlated with Responsiveness to Radiochemotherapy

[0202] In order to identify molecular signatures of responsiveness of rectal carcinomas to neoadjuvant, preoperative radiochemotherapy, we analyzed gene expression profiles of 23 tumor biopsies. The flow of sample collection, clinical diagnosis, and experimental design is depicted in FIG. 1. All patients participated in a randomized clinical trial aimed at comparing the relative benefits of adjuvant versus neoadjuvant radiochemotherapy of locally advanced rectal carcinoma. Since standardization of surgical procedure and evaluation of therapy response is critical, all patient samples were collected from a single clinic (University Medical Center Göttingen, Germany). Before biopsy sampling, initial tumor staging was performed by rectal ultrasound, a procedure that, in the experience of the inventors, shows concordance with the histomorphological classification of tumor resections in more than 85% of cases (Liersch et al. (2003) Chirurg 74, 224-34). In all instances, duplet biopsies were ascertained and submitted to either histopathological evaluation or for the purpose of expression profiling. Neoadjuvant treatment, the histological diagnosis, and surgical resection of carcinomas were standardized as part of the clinical trial.

[0203] To establish the degree of similarity of the bioptic samples and the surgically removed tumors, three matched pairs of biopsies and tumors of patients from the adjuvant treatment arm were compared using gene expression profiling. Average correlation coefficients were in the range of 84%, indicating that in general the tumor biopsies reflect the transcriptome of rectal carcinomas.

[0204] Gene expression profiles of the tumors from patients assigned to the neoadjuvant arm of the study were established using 10K cDNA arrays and then evaluated by class comparison analysis. In class comparison analysis, all samples were evaluated and genes that were differentially expressed in tumors with or without response were identified.

The clinical data and response classification are listed in Table 1. Response classification was based on T-level down-sizing. Nine patients were considered responders (P1-P9) and 14 patients showed no T-level response (P10-P23). T-level down-sizing was supported by 54 genes (p<0.001), which were differentially expressed between the two response classes. Classification results for T-level down-sizing were most accurate using the Compound Covariate Predictor and Diagonal Linear Discriminant analysis. Results are presented here for the Compound Covariate Predictor. Four patients were incorrectly classified, three of whom belonged to the non-response group but were classified as responders (P15, P21 and P23), while responder P1 was incorrectly placed in the non-response group. Class prediction using T-level down-sizing results in 83% correct assignment as to either responders or non-responders (p=0.03). Table 2 shows the classification accuracy obtained for the all six classifiers for the T-level down-sizing classification.

TABLE 2
Classification accuracy
Class label 1 refers to the group of responders, class label 0 to the group of non-responders.

| | | Number | Compound | Linear | | | | Support |
|---|---|---|---|---|---|---|---|---|
| | | of genes | Covariate | Discriminant | 1-Nearest | 3 Nearest | Nearest | Vector |
| Tumor | Class | in | Predictor | Analysis | Neighbor | Neighbor | Centroid | Machine |
| Samples | label | classifier | Correct? | Correct? | Correct? | Correct? | Correct? | Correct? |
| P1 | 1 | 89 | NO | NO | NO | NO | NO | NO |
| P2 | 1 | 48 | YES | NO | NO | NO | YES | NO |
| P3 | 1 | 41 | YES | YES | YES | NO | NO | YES |
| P4 | 1 | 45 | YES | YES | NO | YES | YES | NO |
| P5 | 1 | 36 | YES | YES | YES | YES | YES | YES |
| P6 | 1 | 39 | YES | YES | YES | YES | YES | YES |
| P7 | 1 | 40 | YES | YES | NO | NO | NO | NO |
| P8 | 1 | 47 | YES | YES | NO | YES | YES | NO |
| P9 | 1 | 43 | YES | YES | NO | YES | NO | NO |
| P10 | 0 | 41 | YES | YES | NO | YES | NO | YES |
| P11 | 0 | 39 | YES | YES | YES | YES | YES | YES |
| P12 | 0 | 35 | YES | YES | YES | YES | YES | YES |
| P13 | 0 | 53 | YES | YES | YES | YES | YES | YES |
| P14 | 0 | 38 | YES | YES | YES | YES | YES | YES |
| P15 | 0 | 66 | NO | NO | NO | NO | NO | NO |
| P16 | 0 | 54 | YES | YES | YES | YES | YES | YES |
| P17 | 0 | 47 | YES | YES | YES | YES | YES | YES |
| P18 | 0 | 40 | YES | YES | YES | YES | YES | YES |
| P19 | 0 | 44 | YES | YES | YES | YES | YES | YES |
| P20 | 0 | 43 | YES | YES | YES | YES | NO | NO |
| P21 | 0 | 84 | NO | NO | NO | NO | NO | NO |
| P22 | 0 | 46 | YES | YES | YES | YES | YES | YES |
| P23 | 0 | 56 | NO | YES | NO | NO | NO | NO |
| Percent | | | 83 | 83 | 57 | 70 | 61 | 57 |
| correctly | | | | | | | | |
| classified | | | | | | | | |

[0205] The sensitivity of the test measured as the percentage of responders that were predicted correctly as responders is 89%. Specificity (i.e., patients that were correctly classified as non-responders to radiochemotherapy) was 79%. The positive predictive value (percentage of patients classified as responders who were true responders) is 73% and the negative predictive value (percentage of patients classified as non-responders who were true non-responders) is 92%.

[0206] Table 3 provides the annotation of the 54 most significantly changed genes in class comparison analysis. 41 genes were down-regulated and 13 genes showed higher expression values in the group of responders. This list of genes includes calmin, kinectin 1, copine III, villin-like, motilin, cdc42, myosin IA, cyclin T1, interleukin 12A, SMC1 (structural maintenance of chromosomes 1), platelet derived growth factor C and a number of genes that encode proteins involved in signaling, membrane transport and proteins with varying enzymatic properties (thiolase, lipase, peptidase and protease activity).

TABLE 3

| | DNA | PRT | Probe | | |
|---|---|---|---|---|---|
| | SEQ | SEQ | SEQ | | |
| | ID | ID | ID | | |
| | NO: | NO: | NO: | Description | Clone |
| 1 | 1 | 59 | | calmin (calponin-like, transmembrane) | IncytePD: 1464613 |
| 2 | 2-3 | 60-61 | | FK506 binding protein 1B, 12.6 kDa | IncytePD: 1288118 |
| 3 | 4 | 62 | 113 | kinectin 1 (kinesin receptor) | IncytePD: 3736760 |
| 4 | 5 | 63 | | copine III | IncytePD: 3444952 |
| 5 | 6 | 64 | | glutamic-pyruvate transaminase (alanine | IncytePD: 1630709 |
| | | | | aminotransferase) | |
| 6 | 7 | NO | 114 | Incyte EST | IncytePD: 1607471 |
| 7 | 8 | 65 | | filamin B, beta (actin binding protein 278) | IncytePD: 1871362 |
| 8 | 9 | 66 | | villin-like | IncytePD: 2804190 |
| 9 | 10 | 67 | | homeo box D9 | IncytePD: 2956581 |
| 10 | 11-12 | 68-69 | | CDC42 binding protein kinase alpha (DMPK-like) | IncytePD: 1602261 |
| 11 | 13-14 | 70-71 | | Homo sapiens cDNA FLJ30016 fis, clone | IncytePD: 1570161 |
| | | | | 3NB692000429. | |
| 12 | 15 | 72 | | monoglyceride lipase | IncytePD: 2174920 |
| 13 | 16 | 73 | | acetyl-Coenzyme A acyltransferase 1 (peroxisomal | IncytePD: 1926543 |
| | | | | 3-oxoacyl-Coenzyme A thiolase) | |
| 14 | 17 | 74 | 115 | regulator of G-protein signalling 19 interacting | IncytePD: 1626914 |
| | | | | protein 1 | |
| 15 | 18 | 75 | | p21/Cdc42/Rac1-activated kinase 1 (STE20 | IncytePD: 2632434 |
| | | | | homolog, yeast) | |
| 16 | 19 | 76 | | motilin | IncytePD: 237225 |
| 17 | 20 | 77 | | inositol 1,3,4-triphosphate 5/6 kinase | IncytePD: 1967095 |
| 18 | 21 | 78 | | myosin IA | IncytePD: 1502005 |
| 19 | 22 | 79 | 116 | S164 protein | IncytePD: 2047730 |
| 20 | 23 | 80 | | protein phosphatase 1, regulatory subunit 10 | IncytePD: 2314555 |
| 21 | 24 | 81 | | KIAA0138 gene product | IncytePD: 1731569 |
| 22 | 25 | 82 | | mucin 5, subtype B, tracheobronchial | IncytePD: 1737280 |
| 23 | 26 | 83 | | E74-like factor 1 (ets domain transcription factor) | IncytePD: 1312824 |
| 24 | 27 | 84 | | metal-regulatory transcription factor 1 | IncytePD: 2467743 |
| 25 | 28 | 85 | | small nuclear protein PRAC | IncytePD: 2231168 |
| 26 | 29 | 86 | | cyclin T1 | IncytePD: 2928577 |
| 27 | 30-31 | 87-88 | | hypothetical protein FLJ12949 | IncytePD: 1393595 |
| 28 | 32 | NO | 117 | ESTs, Moderately similar to TRY2_HUMAN | IncytePD: 1222442 |
| | | | | Trypsin II precursor (Anionic trypsinogen) | |
| | | | | [H. sapiens] | |
| 29 | 33 | 89 | | Homo sapiens, clone IMAGE: 4797596, mRNA | IncytePD: 475497 |
| 30 | 34 | 90 | 118 | ESTs | IncytePD: 1398814 |
| 31 | 35 | 91 | | Homo sapiens, clone IMAGE: 5587702, mRNA | IncytePD: 1964852 |
| 32 | 36 | 92 | 119 | WAS protein family, member 2 | IncytePD: 1448116 |
| 33 | 37 | 93 | | adaptor-related protein complex 3, delta 1 subunit | IncytePD: 1301192 |
| 34 | 38 | 94 | | protein expressed in thyroid | IncytePD: 1807085 |
| 35 | 39 | 95 | | sodium channel, nonvoltage-gated 1, beta (Liddle | IncytePD: 2121687 |
| | | | | syndrome) | |
| 36 | 40 | 96 | | KIAA0284 protein | IncytePD: 1890138 |
| 37 | 41 | 97 | | deltex homolog 2 (Drosophila) | IncytePD: 1691161 |
| 38 | 42 | 98 | | myeloid/lymphoid or mixed-lineage leukemia (trithorax | IncytePD: 1692195 |
| | | | | homolog, Drosophila) | |
| 39 | 43 | 99 | | chromosome 11 open reading frame 13 | IncytePD: 1919646 |
| 40 | 44 | 100 | | small nuclear RNA activating complex, polypeptide 2, | IncytePD: 1445203 |
| | | | | 45 kDa | |
| 41 | 45 | 101 | | SMC1 structural maintenance of chromosomes 1-like 1 | IncytePD: 3074894 |
| | | | | (yeast) | |
| 42 | 46 | 102 | | LIV-1 protein, estrogen regulated | IncytePD: 1402273 |
| 43 | 47 | 103 | | membrane-bound transcription factor protease, site 2 | IncytePD: 1302425 |
| 44 | 48 | 104 | 120 | ESTs, glutamate-cysteine ligase, modifier subunit | IncytePD: 1432207 |
| 45 | 49 | NO | 121 | ESTs | IncytePD: 4106720 |
| 46 | 50 | 105 | | hypothetical protein DKFZp762O076 | IncytePD: 1967206 |
| 47 | 51 | 106 | | guanylate cyclase 1, soluble, beta 3 | IncytePD: 1417408 |
| 48 | 52 | 107 | 122 | eukaryotic translation initiation factor 5A2 | IncytePD: 786494 |
| 49 | 53 | 108 | | interleukin 12A (natural killer cell stimulatory factor 1, | IncytePD: 2760318 |
| | | | | cytotoxic lymphocyte maturation factor 1, p35) | |
| 50 | 54 | 109 | | hypothetical protein MGC26706 | IncytePD: 2706048 |
| 51 | 55 | NO | 123 | Incyte EST | IncytePD: 2922438 |
| 52 | 56 | 110 | | solute carrier family 1 (glial high affinity glutamate | IncytePD: 3074077 |
| | | | | transporter), member 3 | |
| 53 | 57 | 111 | | serine/threonine kinase 18 | IncytePD: 2732630 |
| 54 | 58 | 112 | | platelet derived growth factor C | IncytePD: 943826 |

| | UG | Gene | Accession | |
|---|---|---|---|---|
| | cluster | symbol | Number | Map |
| 1 | Hs.406099 | CLMN | NM_024734 | 14q32.2 |
| 2 | Hs.77643 | FKBP1B | NM_004116 | 2p24.1 |
| | | | NM_054033 | |
| 3 | | | AI916662 | |
| 4 | Hs.14158 | CPNE3 | NM_003909 | 8q21.13 |
| 5 | Hs.103502 | GPT | NM_005309 | 8q24.3 |
| 6 | | | | |
| 7 | Hs.81008 | FLNB | NM_001457 | 3p14.3 |
| 8 | Hs.103665 | VILL | NM_015873 | 3p21.3 |
| 9 | Hs.236646 | HOXD9 | NM_014213 | 2q31.1 |
| 10 | Hs.18586 | CDC42BPA | NM_003607 | 1q42.11 |
| | | | NM_014826 | |
| 11 | Hs.14931 | | NM_024880 | 10 |
| | | | NM_030756 | |
| 12 | Hs.6721 | MGLL | NM_007283 | 3q21.3 |
| 13 | Hs.166160 | ACAA1 | NM_001607 | 3p23-p22 |
| 14 | Hs.6454 | RGS19IP1 | AA740666 | 19p13.1 |
| 15 | Hs.64056 | PAK1 | NM_002576 | 11q13-q14 |
| 16 | Hs.2813 | MLN | NM_002418 | 6p21.3 |
| 17 | Hs.6453 | ITPK1 | NM_014216 | 14q31 |
| 18 | Hs.5394 | MYO1A | AF105424 | 12q13-q15 |
| 19 | Hs.180789 | S164 | AI400786 | 14q24.3 |
| 20 | Hs.106019 | PPP1R10 | NM_002714 | 6p21.3 |
| 21 | Hs.159384 | KIAA0138 | NM_014649 | 19p13.3 |
| 22 | Hs.102482 | MUC5B | XM_039877 | 11p15 |
| 23 | Hs.154365 | ELF1 | NM_172373 | 13q13 |
| 24 | Hs.211581 | MTF1 | NM_005955 | 1p33 |
| 25 | Hs.116467 | PRAC | BC_030950 | 17q21 |
| 26 | Hs.279906 | CCNT1 | NM_001240 | 12pter-qter |
| 27 | Hs.184519 | FLJ12949 | NM_178159 | 19p13.2 |
| | | | NM_023008 | |
| 28 | Hs.66915 | | AI934538 | 22 |
| 29 | Hs.355279 | | NM_022740 | 7 |
| 30 | Hs.355960 | | N41458 | 12 |
| 31 | Hs.427683 | | BC035712 | 10 |
| 32 | Hs.288908 | WASF2 | AI094497 | 1p36.11-p34.3 |
| 33 | Hs.75056 | AP3D1 | NM_003938 | 19p13.3 |
| 34 | Hs.7486 | YF13H12 | NM_014297 | 19q13.2 |
| 35 | Hs.37129 | SCNN1B | NM_001039 | 16p12.2-p12.1 |
| 36 | Hs.182536 | KIAA0284 | AB006622 | 14q32.33 |
| 37 | Hs.89135 | DTX2 | NM_020892 | 7q11.23 |
| 38 | Hs.199160 | MLL | BC_036089 | 11q23 |
| 39 | Hs.72925 | C11orf13 | NM_003475 | 11p15.5 |
| 40 | Hs.78403 | SNAPC2 | NM_003083 | 19p13.3-p13.2 |
| 41 | Hs.211602 | SMC1L1 | NM_006306 | Xp11.22-p11.21 |
| 42 | Hs.79136 | LIV-1 | NM_012319 | 18q12.1 |
| 43 | Hs.350970 | MBTPS2 | AF019612 | Xp22.1-p22.2 |
| 44 | Hs.315562 | GCLM | AA805202 | 1p22.11 |
| 45 | Hs.12876 | | AA845636 | 66 |
| 46 | Hs.21621 | DKFZp762O076 | NM_018710 | 8q21.3 |
| 47 | Hs.77890 | GUCY1B3 | BC_047620 | 4q31.3-q33 |
| 48 | Hs.104660 | EIF5A2 | AA134594 | 3q26.2 |
| 49 | Hs.673 | IL12A | NM_000882 | 3p12-q13.2 |
| 50 | Hs.65406 | MGC26706 | NM_152581 | Xp22.31 |
| 51 | | | — | |
| 52 | Hs.75379 | SLC1A3 | Z31713 | 5p13 |
| 53 | Hs.172052 | STK18 | NM_014264 | 4q27-q28 |
| 54 | Hs.43080 | PDGFC | NM_016205 | 4q32 |

List of 54 most significantly changed genes in the class-comparison analysis. UG cluster, unigene cluster.

[0207] Genes 1-41 are expressed at lower levels in the responders, and genes 42-54 are expressed at higher levels in the responders. Gene 1 is the most statistically significant down-regulated gene and gene 41 is the least statistically significant down-regulated gene. Gene 42 is the most statistically significant up-regulated gene and gene 54 is the least statistically significant up-regulated gene.

[0208] The results of a hierarchical cluster analysis of the 54 genes are presented pictorially in FIG. 2. Fifteen of the 54 genes are particularly highly correlated with the degree of responsiveness to radiochemotherapy (p<0.00032). These genes are indicated as genes 1-12 (down-regulated) and 42-44 (up-regulated).

[0209] Several candidate genes have previously been analyzed by other groups for their potential to serve as predictors for response to radiation or chemotherapy. These include Ku70/80, ERCC1, TP53, DPYD (dihydropyrimidine dehydrogenase), and TYMS (thymidylate synthase). The expression levels of these genes in our analysis, however, were not significantly different in groups of responders or non-responders based on T-level down-sizing.

[0210] The 54 genes whose expression levels were most significantly changed represent members of several cellular pathways and map to multiple different chromosomes. Of particular interest are genes that encode proteins involved in DNA damage repair pathways, such as SMC1, which is involved in the S-phase checkpoint mediated by ATM (Yazdi et al. (2002) Genes Dev 16, 571-82; Kim et al. (2002) Genes Dev 16, 560-70). A number of genes were involved in microtubule organization. For instance, calmin has homology to calponin and dystrophin (Ishisaki et al. (2001) Genomics 74, 172-9). Cdc42 is a member of the Rho GTPase subfamily and triggers microtubule reorganization and cytoskeletal remodeling through GSK-3 and APC, two proteins involved in Wnt-signaling (Etienne-Manneville et al. (2003) Nature; 421, 753-6; Harwood et al. (2003) Nat Cell Biol 5, 275-7). Filamin B is an integrator of cell mechanics and signaling and acts in the Rho signaling apparatus (Stossel et al. (2001) Nat Rev Mol Cell Biol 2, 138-45); villin proteins are involved in actin metabolism (Athman et al. (2002) Am J Physiol Gastrointest Liver Physiol 283, G496-502); and kinectin 1 is a binding partner of kinesin, and belongs to a class of molecular motors involved in mitoses, axoplasmic transport and secretion (Karcher et al. (2002) Trends Cell Biol 12, 21-7). The preponderance of genes involved in microtubule organization cannot be explained by relative abundance of members of such gene families alone. Again, none of the previously used candidate genes were present in this list.

[0211] From the foregoing description, one skilled in the art can easily ascertain the essential characteristics of this invention, and without departing from the spirit and scope thereof, can make changes and modifications of the invention to adapt it to various usage and conditions.

[0212] Without further elaboration, it is believed that one skilled in the art can, using the preceding description, utilize the present invention to its fullest extent. The preceding preferred specific embodiments are, therefore, to be construed as merely illustrative, and not limitative of the remainder of the disclosure in any way whatsoever.

[0213] The entire disclosure of all applications, patents and publications, cited above and in the figures are hereby incorporated in their entirety by reference.

1-81. (canceled)

82. A composition comprising at least 5 isolated nucleic acids, each of which hybridizes specifically under conditions of high stringency to part or all of a coding sequence whose expression is correlated with responsiveness of a rectal adenocarcinoma to radiochemotherapy.

83. The composition of claim 82, which comprises at least 5 isolated nucleic acids of at least about 15 contiguous nucleotides selected from nucleic acids that correspond to genes 1-54 from Table 3, and comprises no more than 9,000 total isolated nucleic acids.

84. The composition of claim 83, wherein the nucleic acids that correspond to genes 1-54 of Table 3 are selected from:
(a) nucleic acids that comprise the sequences of SEQ ID NOs: 1-58 or 113-123;
(b) nucleic acids that comprise sequences that are at least about 90% identical to the sequences of SEQ ID NOs: 1-58 or 113-123;
(c) nucleic acids that comprise sequences encoding polypeptides represented by SEQ ID NOs: 59-112;
(d) nucleic acids that comprise sequences of active fragments of the nucleic acids of (a), (b), or (c);
(e) nucleic acids that comprise sequences of active variants of the nucleic acids of (a), (b), or (c) and/or
(f) nucleic acids that comprise complete complements of the sequences of any of the nucleic acids (a)-(e);
wherein the nucleic acids hybridize specifically under conditions of high stringency to nucleic acids represented by SEQ ID NOs: 1-58 or 113-123, or to complements thereof.

85. The composition of claim 83, wherein the at least 5 isolated nucleic acids correspond to genes 1-12 or 42-44 of Table 3.

86. The composition of claim 85, wherein the nucleic acids corresponding to genes 1-12 or 42-44 of Table 3 are selected from:
(a) nucleic acids that comprise sequences comprising SEQ ID NOs: 1-15, 113-114, 46-48, or 120;
(b) nucleic acids that comprise sequences that are at least about 90% identical to SEQ ID NOs: 1-15, 113-114, 46-48, or 120;
(c) nucleic acids that comprise sequences encoding polypeptides represented by SEQ ID NOs 59-72 or 102-104;
(d) nucleic acids that comprise sequences of active fragments of the nucleic acids of (a), (b), or (c);
(e) nucleic acids that comprise sequences of active variants of the nucleic acids of (a), (b), or (c); and/or
(f) nucleic acids that comprise complete complements of the sequences of any of the nucleic acids (a)-(e);
wherein the nucleic acids hybridize specifically under conditions of high stringency to nucleic acids represented by SEQ ID NOs: 1-15, 113-114, 46-48 and 120, or to complements thereof.

87. A composition comprising at least 5 isolated, antigenic, polypeptides for use in generating antibodies for detecting the response of a rectal adenocarcinoma to radiochemotherapy, wherein the polypeptides are polypeptides whose expression is correlated with responsiveness of the adenocarcinoma to radiochemotherapy.

88. The composition of claim 87, wherein the at least 5 isolated, antigenic, polypeptides are selected from polypeptides that correspond to genes 1-54 from Table 3.

89. The composition of claim 88, wherein the composition comprises polypeptides selected from:
(a) polypeptides comprising SEQ ID NOs: 59-112;
(b) polypeptides encoded by polynucleotides comprising SEQ ID NOs: 1-58 or 113-123;
(c) polypeptides whose sequences are at least about 90% identical to SEQ ID NOs: 59-112;
(d) active variants of (a), (b) or (c); and/or
(e) antigenic fragments of (a), (b) or (c).

90. The composition of claim 88, wherein the polypeptides are selected from polypeptides corresponding to genes 1-12 or 42-44 from Table 3.

91. The composition of claim 90, wherein the composition comprises polypeptides selected from:
(a) polypeptides comprising SEQ ID NOs: 59-72 or 102-104;
(b) polypeptides encoded by polynucleotides comprising SEQ ID NOs: 1-15, 113-114, 46-48 or 120;
(c) polypeptides that are at least about 90% identical to SEQ ID NOs: 59-72 or 102-104;
(d) active variants of (a), (b), or (c); and/or
(e) antigenic fragments of (a), (b), or (c).

92. A composition comprising at least 5 isolated antibodies, selected from antibodies that are specific for polypeptides corresponding to genes 1-54 of Table 3.

93. The composition of claim 92, wherein the antibodies are specific for polypeptides selected from:
(a) polypeptides comprising SEQ ID NOs: 59-112;
(b) polypeptides encoded by polynucleotides comprising SEQ ID NOs: 1-58 or 113-123;
(c) polypeptides whose sequences are at least about 90% identical to SEQ ID NOs: 59-112;
(d) active variants of (a), (b) or (c); and/or
(e) antigenic fragments of (a), (b) or (c).

94. The composition of claim 92, wherein the antibodies are specific for polypeptides selected from polypeptides corresponding to genes 1-12 or 42-44 from Table 3.

95. The composition of claim 94, wherein the antibodies are specific for polypeptides selected from:
(a) polypeptides comprising SEQ ID NOs: 59-72 or 102-104;
(b) polypeptides encoded by polynucleotides comprising SEQ ID NOs: 1-15, 113-114, 46-48 or 120;
(c) polypeptides that are at least about 90% identical to SEQ ID NOs: 59-72 or 102-104;
(d) active variants of (a), (b), or (c); and/or
(e) antigenic fragments of (a), (b), or (c).

96. A method for determining if a rectal adenocarcinoma is responsive to radiochemotherapy, comprising:
(a) determining in a polynucleotide sample that represents expressed genes in the rectal adenocarcinoma the amount of each of at least 5 polynucleotides corresponding to genes 1-54 from Table 3, and
(b) comparing the amount of each of the polynucleotides to a baseline value,
wherein an altered amount of the polynucleotides compared to the baseline value indicates that the rectal adenocarcinoma is responsive to radiochemotherapy.

97. The method of claim 96, wherein each of the polynucleotides can hybridize specifically, under conditions of high stringency, to a nucleic acid selected from:
(a) nucleic acids that comprise the sequences of SEQ ID NOs: 1-58 or 113-123;
(b) nucleic acids that comprise sequences that are at least about 90% identical to the sequences of SEQ ID NOs: 1-58 or 113-123;
(c) nucleic acids that comprise sequences encoding polypeptides represented by SEQ ID NOs: 59-112;
(d) nucleic acids that comprise sequences of active fragments of the nucleic acids of (a), (b), or (c);
(e) nucleic acids that comprise sequences of active variants of the nucleic acids of (a), (b), or (c) and/or
(f) nucleic acids that comprise complete complements of the sequences of any of the nucleic acids (a)-(e).

98. The method of claim 96, wherein
a decrease in the expression of polynucleotides in the sample corresponding to genes 1-41 from Table 3, indicates that the adenocarcinoma is responsive to radiochemotherapy; and
an increase in the expression of polynucleotides in the sample corresponding to genes 42-54 from Table 3, indicates that the adenocarcinoma is responsive to radiochemotherapy.

99. A method for determining if a rectal adenocarcinoma is responsive to radiochemotherapy, comprising:
(a) determining in a polypeptide sample which represents expressed genes in the rectal adenocarcinoma the amount of each of at least five polypeptides corresponding to genes 1-54 from Table 3, and
(b) comparing the amount of each of the polypeptides to a baseline value,
wherein an altered amount of the polypeptides compared to the baseline value indicates that the rectal adenocarcinoma is responsive to radiochemotherapy.

100. A kit comprising:
(a) a nucleic acid composition of claim 83 and, optionally,
(b) one or more reagents that facilitate hybridization of the nucleic acids of the composition to the polynucleotide from the sample, and/or that facilitate detection of the hybridized polynucleotide,
or
(c) a composition of at least 5 isolated antibodies selected from antibodies specific for polypeptides corresponding to genes 1-54 of Table 3, and, optionally,
(d) one or more reagents that facilitate binding of the antibodies of the composition to polypeptides of interest, and/or that facilitate detection of bound antibody.

101. A method for identifying a candidate for an agent that enhances the response of a rectal adenocarcinoma to radiochemotherapy, comprising:
(a) contacting a rectal adenocarcinoma cell with a putative agent;
(b) hybridizing a sample of polynucleotides representing expressed genes from the contacted adenocarcinoma cell to a nucleic acid composition of claim 83, under conditions effective for specific hybridization of a nucleic acid probe to its corresponding polynucleotide target, and
(c) determining the amount of specific hybridization of one or more of the polynucleotides in the sample to one or more of the nucleic acids of the composition, compared to the amount of specific hybridization in the absence of the putative agent,
wherein the amount of specific hybridization of a polynucleotide reflects the amount of its expression in the contacted adenocarcinoma, and
wherein a putative agent that enhances the expression of one or more polynucleotides corresponding to genes 42-54 from Table 3, or that reduces the expression of one or more polynucleotides corresponding to genes 1-41 from Table 3, compared to the amount in the absence of the putative agent, is a candidate for an agent that enhances the response of a rectal adenocarcinoma to radiochemotherapy;
or
(d) contacting a rectal adenocarcinoma cell with a putative agent;
(e) contacting a sample of polypeptides obtained from the contacted adenocarcinoma cell to an antibody composition of claim 92, under conditions effective for specific binding of an antibody to its corresponding polypeptide; and
(f) determining the amount of specific binding of one or more of the polypeptides in the sample to one or more of the antibodies of the composition, compared to the amount in the absence of the putative agent,
wherein the amount of specific binding of a polypeptide reflects the amount of its expression in the contacted adenocarcinoma, and
wherein a putative agent that enhances the expression of one or more polypeptides corresponding to genes 42-54, or that reduces the expression of one or more polypeptides corresponding to genes 1-41, compared to the amount in the absence of the putative agent, is a candidate for an agent that enhances the response of a rectal adenocarcinoma to radiochemotherapy.

The application's sequence listing, which the Patent Office published only in electronic form, follows.

SEQUENCE LISTING (123 sequences)

SEQ ID NO: 1 - DNA, 3118 bp, Homo sapiens
gcgcgcccgccagccaggctctccgcgcccgccgcccgcgccgcgctggcccgggctctcccgcccgcgcttcatggctgcacacgagtgggactggttccaacgcgaggagctcatcgggcagattagcgacatccgagtgcagaacctgcaagttgagagggaaaatgtgcagaagaggacctttacacgatggataaatctacatctagaaaagtgcaacccacctctagaagttaaagatttattcgtcgatatacaagatggcaaaatcctaatggctttgttagaagtcctgtctgggcggaatctgctgcacgaatacaaatcctcgtcgcatcgtatttttcggttgaacaacatagcgaaagcacttaagtttttggaagatagcaatgtaaaactggttagcattgatgcagcagaaatagcagatggcaacccttctttggttcttgggctgatatggaacataatcctcttcttccagattaaggagctcacaggcaacctcagcagaaactctccatcttccagcttgtcccctggctcagggggcacagactcagactcatccttcccacccacacccactgcagagaggagcgtggcaatatcggtgaaagaccagaggaaggctatcaaggccctgttggcgtgggtgcagaggaaaacgagaaagtatggcgtggcggtgcaggactttgcgggcagttggaggagtgggctggctttcctggcggtgatcaaggccattgaccccagcctggtggacatgaaacaggccctggaaaattccacacgagaaaatctagagaaggctttcagcatcgcacaggatgccctgcacatccccaggctcctggagccagaagacatcatggttgacacaccagacgagcagtctatcatgacttacgtggcacagtttctagaacgttttccggagttggaagccgaagatattttcgattcagataaagaagttcctatcgaatccacttttgttcgcatcaaagaaactccttctgaacaggagagcaaagtcttcgttctgactgaaaatggggagcgtacctacactgttaaccatgaaaccagccacccaccaccctccaaagtctttgtctgtgacaagcccgagagcatgaaggaattccgcctggatggtgtttccagccatgcgctgtcagacagctccaccgagttcatgcaccagattattgaccaggtcctgcaagggggcccaggtaagaccagcgacatcagtgagccatctccagaatcctccattttatcatccagaaaggagaacgggaggtccaactctttgccgatcaagaaaacagttcactttgaggctgacacctacaaggatcctttctgcagtaagaacctgtccctttgctttgaagggagcccaagagtggcaaaggaatcattgaggcaggatggacatgtcttggcagttgaggttgctgaggaaaaggaacagaaacaggaatcctcgaagattccagaatcctcctctgacaaggtcgctggtgacatttttttggtggagggcacaaacaataattctcagtcttcttcctgtaatggtgctttagagagtacagcccgccacgatgaagaaagtcactctctttcacccccaggagaaaatactgtgatggccgattccttccagatcaaggttaacctgatgactgtagaagctttagaggagggagactattttgaagccatcccattaaaagcctcaaaatttaacagcgacctaatagattttgcttctaccagccaggctttcaacaaagttccttcacctcatgagacaaaacctgacgaggatgctgaggcttttgagaatcatgctgaaaaactaggtaaaaggagtattaaatctgctcacaaaaagaaggattcgccagagcctcaagttaagatggacaaacatgaacctcatcaggactccggagaagaagctgaaggctgtccttcagccccagaagagacaccagtggataaaaagccagaggtgcatgaaaaggccaagagaaagtccacccgtcctcattatgaggaagagggagaagacgatgacctccagggtgtgggcgaggaattatcttccagccccccaagcagctgtgtcagcttggagacccttgggagtcacagcgaagaaggcctggatttcaagccctccccacccctctcaaaggtttccgtcattccccacgacctcttctatttcccacactatgaggttcccctggctgcagttttggaggcttatgtagaagacccggaggatctaaaaaatgaagaaatggatctcgaagagccagagggctatatgccagacctggactccagggaggaggaggccgatggctctcagagcagctccagttcctcggtgccaggagagagcctccccagtgccagcgaccaggtgctgtatctcagcaggggtggtgtgggtaccacaccagcctcagaacccgctccactggccccccatgaggaccaccagcaaagggagaccaaagagaatgaccccatggacagccatcagtcccaggaatccccaaacctggaaaacatagcaaaccccctagaagaaaatgtaacgaaagaatcaatcagtagtaaaaaaaaggaaaaaaggaaacatgtggaccacgtagaaagttcactatttgtagcaccaggaagtgttcaatcctcagatgacctagaagaagacagtagcgactacagcattccttccaggactagtcacagtgactccagcatttaccttcgacgacatactcataggtcttcggaatcggatcattttagctatgttcagttgaggaacgcagcagatctggatgacagaagaaaccgaatattaaccaggaaggccaacagctcaggagaagccatgtcactggggagccacagcccgcagagtgactccctgacacagcttgtccagcagccggatatgatgtattttattctcttcctgtggctcctggtgtactgcttgctgctcttcccacaactggatgttagcaggctctgatacgtgtgtctggataataaaaaagacaggaccctg

SEQ ID NO: 2 - DNA, 930 bp, Homo sapiens
gcgagccggagcgacggcggggctggggccggagccgagccggggtcgggcagcagcagggaccccccagaggcggggcctgtgggaccgctatgggcgtggagatcgagaccatctcccccggagacggaaggacattccccaagaagggccaaacgtgtgtggtgcactacacaggaatgctccaaaatgggaagaagtttgattcatccagagacagaaacaaacctttcaagttcagaattggcaaacaggaagtcatcaaaggttttgaagagggtgcagcccagatgagcttggggcagagggcgaagctgacctgcacccctgatgtggcatatggagccacgggccaccccggtgtcatccctcccaatgccaccctcatctttgacgtggagctgctcaacttagagtgaaggcaggaaggaactcaaggtggtggctggagatggctgctgctcaccctcctagcctgctctgccactgggacggctcctgcttttggggctcttgatcagtgtgctaacctcactgcctcatggcatcatccattctctctgcccaagttgctctgtatgtgttcgtcagtgttcatgcgaattcttgcttgaggaaacttcggttgcagattgaagcatttcaggttgtgcattttgtgtgatgcatgtagtagcctttcctgatgacagaacacagatctcttgttcgcacaatctacactgccttaccttcacttaaaccacacacacaaggtgctcagacatgaaatgtacatggcgtaccgtacacagagggacttgagccagttacctttgctgtcactttctctcttataaattctgttagctgctcacttaaacaatgtcctctttgagaaaatgtaaaataaaggctctgtgcttgacaaaaaaaaaaaaaaaaaaaaaa

SEQ ID NO: 3 - DNA, 972 bp, Homo sapiens
gcgagccggagcgacggcggggctggggccggagccgagccggggtcgggcagcagcagggaccccccagaggcggggcctgtgggaccgctatgggcgtggagatcgagaccatctcccccggagacggaaggacattccccaagaagggccaaacgtgtgtggtgcactacacaggaatgctccaaaatgggaagaagtttgattcatccagagacagaaacaaacctttcaagttcagaattggcaaacaggaagtcatcaaaggttttgaagagggtgcagcccagctgggtcctctttctcctctccccatctgcccccatccctgctagatgagcttggggcagagggcgaagctgacctgcacccctgatgtggcatatggagccacgggccaccccggtgtcatccctcccaatgccaccctcatctttgacgtggagctgctcaacttagagtgaaggcaggaaggaactcaaggtggctggagatggctgctgctcaccctcctagcctgctctgccactgggacggctcctgcttttggggctcttgatcagtgtgctaacctcactgcctcatggcatcatccattctctctgcccaagttgctctgtatgtgttcgtcagtgttcatgcgaattcttgcttgaggaaacttcggttgcagattgaagcatttcaggttgtgcattttgtgtgatgcatgtagtagcctttcctgatgacagaacacagatctcttgttcgcacaatctacactgccttaccttcacttaaaccacacacacaaggtgctcagacatgaaatgtacatggcgtaccgtacacagagggacttgagccagttacctttgctgtcactttctctcttataaattctgttagctgctcacttaaacaatgtcctctttgagaaaatgtaaaataaaggctctgtgcttgacaaaaaaaaaaaaaaaaaaaaaa

SEQ ID NO: 4 - DNA, 4816 bp, Homo sapiens
cgtcttcccggtctcctttcccggccgcacagggtagattttcgttccgtcacccaggctggagtgcagtggtgtgaccttggcttgctgcaaccctttgcctcctgggttcaagtgattctcattgcctcagcctcctaagtagctgggattacaggttttataggatcacattgacaaaagtaccatggagttttatgagtcagcatattttattgttcttattccttcaatagttattacagtaattttcctcttcttctggcttttcatgaaagaaacattatatgatgaagttcttgcaaaacagaaaagagaacaaaagcttattcctaccaaaacagataaaaagaaagcagaaaagaaaaagaataaaaagaaagaaatccagaatggaaacctccatgaatccgactctgagagtgtacctcgagactttaaattatcagatgctttggcagtagaagatgatcaagttgcacctgttccattgaatgtcgttgaaacttcaagtagtgttagggaaagaaaaaagaaggaaaagaaacaaaagcctgtgcttgaagagcaggtcatcaaagaaagtgacgcatcaaagattcctggcaaaaaagtagaacctgtcccagttactaaacagcccacccctccctctgaagcagctgcctcgaagaagaaaccagggcagaagaagtctaaaaatggaagcgatgaccaggataaaaaggtggaaactctcatggtaccatcaaaaaggcaagaagcattgcccctccaccaagagactaaacaagaaagtggatcagggaagaagaaagcttcatcaaagaaacaaaagacagaaaatgtcttcgtagatgaaccccttattcatgcaactacttatattcctttgatggataatgctgactcaagtcctgtggtagataagagagaggttattgatttgcttaaacctgaccaagtagaagggatccagaaatctgggactaaaaaactgaagaccgaaactgacaaagaaaatgctgaagtgaagtttaaagattttcttctgtccttgaagactatgatgttttctgaagatgaggctctttgtgttgtagacttgctaaaggagaagtctggtgtaatacaagatgctttaaagaagtcaagtaagggagaattgactacgcttatacatcagcttcaagaaaaggacaagttactcgctgctgtgaaggaagatgctgctgctacaaaggatcggtgtaagcagttaacccaggaaatgatgacagagaaagaaagaagcaatgtggttataacaaggatgaaagatcgaattggaacattagaaaaggaacataatgtatttcaaaacaaaatacatgtcagttatcaagagactcaacagatgcagatgaagtttcagcaagttcgtgagcagatggaggcagagatagctcacttgaagcaggaaaatggtatactgagagatgcagtcagcaacactacaaatcaactggaaagcaagcagtctgcagaactaaataaactacgccaggattatgctaggttggtgaatgagctgactgagaaaacaggaaagctacagcaagaggaagtccaaaagaagaatgctgagcaagcagctactcagttgaaggttcaactacaagaagctgagagaaggtgggaagaagttcagagctacatcaggaagagaacagcggaacatgaggcagcacagcaagatttacagagtaaatttgtggccaaagaaaatgaagtacagagtctgcatagtaagcttacagataccttggtatcaaaacaacagttggagcaaagactaatgcagttaatggaatcagagcagaaaagggtgaacaaagaagagtctctacaaatgcaggttcaggatattttggagcagaatgaggctttgaaagctcaaattcagcagttccattcccagatagcagcccagacctccgcttcagttctagcagaagaattacataaagtgattgcagaaaaggataagcagataaaacagactgaagattctttagcaagtgaacgtgatcgtttaacaagtaaagaagaggaacttaaggatatacagaatatgaatttcttattaaaagctgaagtgcagaaattacaggccctggcaaatgagcaggctgctgctgcacatgaattggagaagatgcaacaaagtgtttatgttaaagatgataaaataagattgctggaagagcaactacaacatgaaatttcaaacaaaatggaagaatttaagattctaaatgaccaaaacaaagcattaaaatcagaagttcagaagctacagactcttgtttctgaacagcctaataaggatgttgtggaacaaatggaaaaatgcattcaagaaaaagatgagaagttaaagactgtggaagaattacttgaaactggacttattcaggtggcaactaaagaagaggagctgaatgcaataagaacagaaaattcatctctgacaaaagaagttcaagacttaaaagctaagcaaaatgatcaggtttcttttgcctctctagttgaagaacttaagaaagtgatccatgagaaagatggaaagatcaagtctgtagaagagcttctggaggcagaacttctcaaagttgctaacaaggagaaaactgttcaggatttgaaacaggaaataaaggctctaaaagaagaaataggaaatgtccagcttgaaaaggctcaacagttatctatcacttccaaagttcaggagcttcagaacttattaaaaggaaaagaggaacagatgaataccatgaaggctgttttggaagagaaagagaaagacctagccaatacagggaagtggttacaggatcttcaagaagaaaatgaatctttaaaagcacatgttcaggaagtagcacaacataacttgaaagaggcctcttctgcatcacagtttgaagaacttgagattgtgttgaaagaaaaggaaaatgaattgaagaggttagaagccatgctaaaagagagggagagtgatctttctagcaaaacacagctgttacaggatgtacaagatgaaaacaaattgtttaagtcccaaattgagcagcttaaacaacaaaactaccaacaggcatcttcttttccccctcatgaagaattattaaaagtaatttcagaaagagagaaagaaataagtggtctctggaatgagttagattctttgaaggatgcagttgaacaccagaggaagaaaaacaatgaccttcgggagaaaaactgggaagcaatggaagcattggcatcaactgaaaaaatgctgcaggacaaagtgaacaagacttccaaggaaaggcagcaacaggtggaagctgttgagttggaggctaaagaagttctcaaaaaattatttccaaaggtgtctgtcccttctaatttgagttatggtgaatggttgcatggatttgaaaaaaaggcaaaagaatgtatggctggaacttcagggtcagaggaggttaaggttctagagcacaagttgaaagaagctgatgaaatgcacacattgttacagctagagtgtgaaaaatacaaatccgtccttgcagaaacagaaggaattttacagaagctacagagaagtgttgagcaagaagaaaataaatggaaagttaaggtcgatgaatcacacaagactattaaacagatgcagtcatcatttacatcttcagaacaagagctagagcgattaagaagcgaaaataaggatattgaaaatctgagaagagaacgagaacatttggaaatggaactagaaaaggcagagatggaacgatctacctatgttacagaagtcagagagctgaaagatctgttgactgaattgcagaaaaaacttgatgattcatattctgaagcagtaagacagaatgaagagctaaatttgttgaaggcacagttaaatgaaacactcacaaaacttagaactgaacaaaatgaaagacagaaggtagctggtgatttgcataaggctcaacagtcactggagcttatccagtcaaaaatagtaaaagctgctggagacactactgttattgaaaatagtgatgtttccccagaaacggagtcttctgagaaggagacaatgtctgtaagtctaaatcagactgtaacacagttacagcagttgcttcaggcggtaaaccaacagctcacaaaggagaaagagcactaccaggtgttagagtgatcatcctctggcctaccttgacacatgctctccttcaaaatgctaattcagagtgaagtaattgggaaactgttcatttgaggataaaaaaggcattgtattatattttgccaaattaaagccttatttatgttttcaccctttctactttgtcagaaacactgaacagagttttgtcttttctaatccttgttagactactgatttaaagaaggaaaaaaaaaagccaactctgtagacaccttcagagtttagttttataataaaaactgtttgaataattagacctttacattcctgaagataaacatgtaatcttttatcttattttgctcaataaaattgttcagaagatcaaagtggtaaagacaatgtaaaatttaacattttaatactgatgttgtacactgttttacttaacattttgggaagtaactgcctctgacttcaactcaagaaaacacttttttgttgctaatgtaatcggtttttgtaatggcgtcagcaaataaaaggatgcttattattcaaaaaaaaaaaaaaaaaaaaaaaaaa

SEQ ID NO: 5 - DNA, 4737 bp, Homo sapiens
gtcccagcgtcgctccggacgctgccaacctgttctccaccgtcgctcgacttccacctctaagactcccacgaaactcaggttgaataattcatcaaattacacaactgaactcaagacatggctgcccagtgtgtcacaaaggtggcgctgaatgtttcctgtgccaatcttttggataaagatatagggtcaaagtcagaccctttatgtgtgttgtttttgaatacaagtggtcaacagtggtatgaggttgagcgcacagaaaggattaagaattgcttgaatccccaattttccaagacatttattattgattactactttgaagtggttcagaaattgaaatttggggtttatgacatcgacaacaaaactattgagctgagtgatgatgacttcttaggggaatgtgaatgtacccttggacaaattgtttccagcaagaagctaactcgaccactggtgatgaaaactggcagacctgcaggaaaagggagcattacgatttcagctgaagaaataaaagataatagagtggtcttgtttgaaatggaagccagaaaactggataataaggatctatttggaaagtcagacccatacctggaattccacaagcagacatctgatggaaactggctaatggttcatcggacagaggttgttaaaaacaacttgaatcctgtttggaggcctttcaagatctctcttaactcactgtgttacggagatatggacaaaaccattaaggtggagtgttatgattatgacaatgatgggtcacatgatctcattggaacatttcagaccaccatgacaaaactgaaagaagcctccagaagctcacctgttgaatttgaatgcataaatgagaaaaaaaggcaaaagaaaaaaagctacaagaattcaggtgttatcagtgtgaaacagtgtgagattacagtagaatgcacattccttgactatataatgggaggatgtcagctgaattttactgtgggagtggacttcactggctccaatggtgacccaaggtctccagactcccttcattacatcagccccaatggcgttaatgagtatttgactgctctctggtctgtgggactggtcattcaagattatgatgctgataagatgtttccagcttttggttttggcgctcagatacctcctcagtggcaggtatcacatgaatttccaatgaacttcaacccatccaatccctactgcaatggaatccaaggcattgtagaggcgtatcggtcttgtcttcctcagataaaactctatggaccaactaatttttctccaatcataaatcacgtggccaggtttgctgctgcagccacgcaacagcagacagcttctcaatattttgtgcttttgattattactgatggtgtgatcacagaccttgatgaaaccagacaagctatagttaatgcctccaggctgcctatgtccatcataattgttggagttggaggtgctgacttcagcgccatggagtttctggatggtgatggtggaagtctccgctccccattgggcgaagtggccatcagagatattgtccagtttgtgcctttcagacagttccagaatgctccaaaagaagcacttgctcagtgtgtcttggcagagattccccagcaggtggtgggctacttcaatacatacaaactccttcctcccaagaacccagccacgaaacaacagaagcagtgaccacttcaacagaattcttttgtgttatgtggagcaatgccatctctcaccccaaatcgtgtatctgtcattctacgtactttttacccccagcatttatgatgtaaatctctttctctatggattatatctgtttaaagcattctttctaggttattttggggggacagtgccaagtccatctttgcccagtcaattcagtgattgatagcaatttacattaattgcagtaaagctctttggattagaaattagtgtggggaaagcttattctgttgttgtttttgtttactttcatatgatgaaaatgctgtgtttaagtgtttgtcaataggaagaatggaaaactgttgggatgatgtggtttgcaggttgctgtgcctgattcacagtgtatgttgtataagccaatgtccatacctgattatgagagcttcttaaattatatgatatcaaatttgttcctgtaactctgtatacagtgcttttctgcaaggtaaaaataacctgtctatgcatctgatttttgctacagtttagacactgtggtttacaaaacagcatgcactcaacttgggactttatgaaaagtactgaatgagcaggaaaaggcgcatactcagttttttaaatgtacaatcaacaagtaaaaataacctcatgtaagtaagccatttttatttgcctttctagatattttattttattgtggaaaactgtaaacatggtcagatttggctttttttttcattaactgagcaagactttcaggatattgtagatgcacagatggtaggttgtcctgaattctacattattagattactttaattgagatttgttaaaacggttaggactgttttgtccaggaaagataagaggaccaaacatataaggtgaaattcagaattccgtttccttctaactaatgaaaaactgcttactaaaaaaaaattttatactttccttgctaaggtcccatatattgatttgtacagatccacttagtcattttctcctttttttaagaaccattttcatctgatttttaaactcacgataccagttatctgttaatcaaaattgcattttacaatttaataatgtgatatttcctatgtctacagcataccttattaggtataaaacctactgcaacttagaaaaaggaaagaaaaaagaagacttttccaactgctgcattaagatagggtggattttatgtgctttttttttttaagagttgaatttcttttcctgacttttaccttttacagcgtattacttagtgaacattacattttcagaatagatcctaatattttattgagggcctatgtgctaaaaactatgcatatctatatattggccaattatctttaataatttaccttttgaaattgcatgtttatcatatatccttaagtggacacatacagtgccatgttgatgtgcctctcagttttattgaaaagctgccccacagcccatgtctcttgttctctgcaatgcctcaagggagtgagctctcaaccacagatagctgtggcttctcagaagcagctcattgccaaggccaggctgagaggggacctgcttgctgtggtggttgcctagcccagatgagcatttacctaccaccttcccacttggctagctgtcctttggatatgtgctgttaactggggaaggcatctaactagtagcctgctactccatagtatggctcaatagatgacacatcattttgacattatcaataggagaaaagaaaactaacccttcttctgattgtttggagccatagttgtctcagatgttctaattctctttgtatgcttggaaacagcatagatatgttgctgtggttttcagaattttctcttttaatcacaagaagccttttaaaaaatgacttacacatattctcaatgtacagtaaaacagacagaagtgagcttatctgtttgatgctgtggcagggtcccagtcactgggcatatcctccttctccttaaccagcttctcagcagcccctgagtcacctgcacaaggtgcttgggaactgctggttatgagcattcctggttttcttcagccaaataacaggtaatcactgtcaattggatttggtcttcattattttatattctgattttatcagaattattctattttaaaattgttttaaaatttaaaaacatttaattcatgatcatgttcatcagtagatgctattattcataagaactgtgattccagcaaactagggtaattggtgcctttttacagttttgaataaaagcatttacaatttctaaattatcagttttcacagtttcagcactcaacctcatcatacgctgatttaatattgttttacattaaaatagtccttttccctgttgtgccaccattcatttaagtgctgtttgttcttaaaatgcatttaaagaaaaattacccatattgactttcacacctcatataatcagatctattacaaatatatatcggagtgacggtgcccaggatagatgtaatatttcttacagatgctggcacagaggaaataatataccagctaatctagtcacctaaccttgtggttagaattgcaattttaagaccagaaaaatttgaagtctgatcagagatttacaactgttcattatagtggtgccttaggcaatctttccaaagtaaattcagggccccattgctacttatgccatatttggacatactttttttttcttcaattttgtaaacttcctggaaagctgtcttcactaagtatcccctagtctctatatatgtggttagtagtcatggaaatgacacataaagtacgccagaagtttgatggaacgtgttagaaactgttttgtgcttttatggatgtcatacttgacaatacatgtgtaagttactaatatatgaattgatgctaaatatatcttacatttgaattccttttggataaagttatttcttgatgtg

SEQ ID NO: 6 - DNA, 1924 bp, Homo sapiens
ccccgccttcacccactgcctctgcctccctggggcagagctgtttcccagacgggtggggcggggcccaactgtcccagctccttcagccctttctgtccctcccagtgaggccagctgcggtgaagagggtgctctcttgcctggcgttccctctgcacggctgccccctcccaccctgcccactaagccagacccactgtcgccattcccacttctggtcctgccacctcctgagctgccttcccgcctggtctgggtagagtcatggcctcgagcacaggtgaccggagccaggcggtgaggcatggactgagggcgaaggtgctgacgctggacggcatgaacccgcgtgtgcggagagtggagtacgcagtgcgtggccccatagtgcagcgagccttggagctggagcaggagctgcgccagggtgtgaagaagcctttcaccgaggtcatccgtgccaacatcggggacgcacaggctatggggcagaggcccatcaccttcctgcgccaggtcttggccctctgtgttaaccctgatcttctgagcagccccaacttccctgacgatgccaagaaaagggcggagcgcatcttgcaggcgtgtgggggccacagtctgggggcctacagcgtcagctccggcatccagctgatccgggaggacgtggcgcggtacattgagaggcgtgacggaggcatccctgcggaccccaacaacgtcttcctgtccacaggggccagcgatgccatcgtgacggtgctgaagctgctggtggccggcgagggccacacacgcacgggtgtgctcatccccatcccccagtacccactctactcggccacgctggcagagctgggcgcagtgcaggtggattactacctggacgaggagcgtgcctgggcgctggacgtggccgagcttcaccgtgcactgggccaggcgcgtgaccactgccgccctcgtgcgctctgtgtcatcaaccctggcaaccccaccgggcaggtgcagacccgcgagtgcatcgaggccgtgatccgcttcgccttcgaagagcggctctttctgctggcggacgaggtgtaccaggacaacgtgtacgccgcgggttcgcagttccactcattcaagaaggtgctcatggagatggggccgccctacgccgggcagcaggagcttgcctccttccactccacctccaagggctacatgggcgagtgcgggttccgcggcggctatgtggaggtggtgaacatggacgctgcagtgcagcagcagatgctgaagctgatgagtgtgcggctgtgcccgccggtgccaggacaggccctgctggacctggtggtcagcccgcccgcgcccaccgacccctcctttgcgcagttccaggctgagaagcaggcagtgctggcagagctggcggccaaggccaagctcaccgagcaggtcttcaatgaggctcctggcatcagctgcaacccagtgcagggcgccatgtactccttcccgcgcgtgcagctgcccccgcgggcggtggagcgcgctcaggagctgggcctggcccccgatatgttcttctgcctgcgcctcctggaggagaccggcatctgcgtggtgccagggagcggctttgggcagcgggaaggcacctaccacttccggatgaccattctgccccccttggagaaactgcggctgctgctggagaagctgagcaggttccatgccaagttcaccctcgagtactcctgagcaccccagctggggccaggctgggtcgccctggactgtgtgctcaggagccctgggaggctctggagcccactgtacttgctcttgatgcctggcggggtggggtggggggggtgctgggcccctgcctctctgcaggtccctaataaagctgtgtggcagtctg

SEQ ID NO: 7 - DNA, 1924 bp, Homo sapiens; identical to SEQ ID NO: 6

SEQ ID NO: 8 - DNA, 9432 bp, Homo sapiens
gccgtggctccggtagcagcaagttcgaaccccgctcccgctccgcttcggttctcgctccttcggcccttgggcctccaaacaccagtccccggcagctcgttgcgcattgcgctctccccgccaccaggatgccggtaaccgagaaggatctagctgaggacgcgccttggaagaagatccagcagaacacgttcacacgctggtgcaacgagcacctcaagtgcgtgaacaaacgcatcggcaacctgcagaccgacctgagcgacgggctgcggctcatcgcgctgctcgaggtgctcagccagaagcgcatgtaccgcaagtaccatcagcggcccacctttcgccagatgcagctcgagaatgtgtccgtggcgctcgagttcctggaccgtgagagcatcaagctcgtgtccatcgatagcaaagccattgtggatgggaacctgaagctcatcttgggtctggtgtggacgctgatcctccactactccatctccatgcccgtgtgggaggatgaaggggatgatgatgccaagaagcagacgccaaagcagaggctgctggggtggattcagaacaagatcccctacttgcccatcaccaactttaaccagaactggcaagacggcaaagccctgggagccctggtagacagctgtgctccaggtctgtgcccagactgggaatcctgggacccgcagaagcctgtggataatgcacgagaagccatgcagcaggcagatgactggctgggtgtcccacaggtcatcactcctgaagaaatcattcacccggatgtggacgagcactcagttatgacttacctgtcccagttccccaaagccaagctcaagccgggggctcctctcaaacccaaactcaacccgaagaaagccagggcctatggcagaggaatcgagcccactggaaacatggtgaagcagccagccaagttcactgtggacaccatcagcgccgggcaaggagacgtgatggtgtttgttgaggacccagaagggaacaaagaggaggcacaagtgacccctgacagcgacaagaacaagacatactctgtggagtatctgcccaaggtcaccgggctacacaaagtcacagtcctctttgcaggacagcacatctccaagagcccatttgaagtgagtgttgacaaggcccagggagatgccagtaaagtcactgcaaaaggtccagggttggaagctgtagggaacatcgccaataagcccacctactttgacatctatacggcaggagctggtgtgggtgacattggtgtggaggtggaagatccccaggggaagaacaccgtggagttgctcgtggaagacaaaggaaaccaggtgtatcgatgtgtgtacaaacccatgcagcctggccctcacgtggtcaagatcttctttgctggggacactattcctaagagtcccttcgttgtgcaggttggggaagcctgcaatccaaatgcctgccgggccagtggccgaggcctacaacccaaaggcgtccgtatccgggagaccacagatttcaaggttgacaccaaagctgcaggaagtggggagctcggggtaaccatgaagggtcctaagggtctggaggagctggtgaagcagaaagactttctggatggggtctacgcattcgagtattaccccagcaccccggggagatacagcattgccatcacatgggggggacaccacattccaaagagcccctttgaagttcaagttggccctgaagcgggtatgcagaaagtccgtgcttggggccctgggctccatggtgggattgtcgggcggtcagcggacttcgtggtagaatccattggctctgaagtggggtctctggggtttgccattgaaggcccctctcaggcaaagattgagtacaacgaccagaatgatggatcgtgtgatgtcaaatactggcccaaggagcctggcgaatatgctgttcacatcatgtgtgacgacgaagacatcaaggacagcccgtacatggccttcatccacccagccacgggaggctacaaccctgatctggttcgagcatacgggccaggtttggagaaatctggatgcattgtcaacaacctggccgagttcactgtggatcctaaggatgctggaaaagctcccttaaagatatttgctcaggatggggaaggccaacgcattgacatccagatgaagaaccggatggacggcacatatgcatgctcatacaccccggtgaaggccatcaagcacaccattgctgtggtctggggaggcgtgaacatcccgcacagcccctacagggtcaacatcgggcaaggtagccatcctcagaaggtcaaagtgtttgggccaggtgtggagagaagtggtctgaaggcaaatgaacctacacacttcacggtggactgtactgaggctggggaaggtgatgtcagtgttggcattaagtgtgatgcccgggtgttaagtgaagatgaggaagacgtggattttgacattattcacaatgccaatgatacgttcacagtcaaatatgtgcctcctgctgctgggcgatacactatcaaagttctctttgcatctcaggaaatccccgccagccctttcagagtcaaagttgacccttcccacgatgccagcaaagtgaaggcagaaggcccagggctcagcaaagcaggtgtggaaaatgggaaaccgacccacttcactgtctacaccaagggggctgggaaagccccgctcaacgtgcagttcaacagccctcttcctggcgatgcagtgaaggatttggatatcatcgataattatgactactctcacacggttaaatatacacccacccaacagggcaacatgcaggttctggtgacttacggtggcgatcccatccctaaaagccctttcactgtgggtgttgctgcaccgctggatctgagcaagataaaactcaatgggctggaaaacagggtggaagttgggaaggatcaggagttcaccgttgataccaggggggcaggaggccaggggaagctggacgtgacaatcctcagcccctctcggaaggtcgtgccatgcctagtgacacctgtgacaggccgggagaacagcacggccaagttcatccctcgggaggaggggctgtatgctgtagacgtgacctacgatggacaccctgtgcccgggagcccctacacagtggaggcctcgctgccaccagatcccagcaaggtgaaggcccacggtcccggcctcgaaggtggtctcgtgggcaagcctgccgagttcaccatcgataccaaaggagctggtactggaggtctgggcttaacggtggaaggtccgtgcgaggccaaaatcgagtgctccgacaatggtgatgggacctgctccgtctcttaccttcccacaaaacccggggagtacttcgtcaacatcctctttgaagaagtccacatacctgggtctcccttcaaagctgacattgaaatgccctttgacccctctaaagtcgtggcatcggggccaggtctcgagcacgggaaggtgggtgaagctggcctccttagcgtcaactgctcggaagcgggaccgggggccctgggcctggaagctgtctcggactcgggaacaaaagccgaagtcagtattcagaacaacaaagatggcacctacgcggtgacctacgtgcccctgacggccggcatgtacacgttgaccatgaagtatggtggcgaactcgtgccacacttccccgcccgggtcaaggtggagcccgccgtggacaccagcaggatcaaagtctttggaccaggaatagaagggaaagatgtgttccgggaagctaccaccgactttacagttgactctcggccgctgacccaggttgggggtgaccacatcaaggcccacattgccaacccctcaggggcctccaccgagtgctttgtcacagacaatgcggatgggacctaccaggtggaatacacaccctttgagaaaggtctccatgtagtggaggtgacatatgatgacgtgcctatcccaaacagtcccttcaaggtggctgtcactgaaggctgccagccatctagggtgcaagcccaaggacctggattgaaagaggcctttaccaacaagcccaatgtcttcaccgtggttaccagaggcgcaggaattggtgggcttggcataactgttgagggaccatcagagtcgaagataaattgcagagacaacaaggatggcagctgcagtgctgagtacattcctttcgcgccgggggattacgatgttaatatcacatatggaggagcccacatccctggcagccccttcagggttcctgtgaaggatgttgtggaccccagcaaggtcaagattgccggccccgggctgggctcaggcgtccgagcccgtgtcctgcagtccttcacggtggacagcagcaaggctggcctggctccgctggaagtgagggttctgggcccacgaggcttggtggagccagtgaacatggtggacaatggagatggcacacacacagtaacctacaccccatctcaggagggaccttacatggtctcagttaaatatgctgatgaagagattcctcgcagtcccttcaaggtcaaggtccttcccacatatgatgccagcaaagtgactgccagtggccccggccttagttcctatggtgtgcctgccagtctacctgtggactttgcaattgatgcccgagatgccggggaaggcctgcttgctgttcaaataacggaccaagaaggaaaacccaaaagagccattgtccatgacaataaagatggcacgtatgctgtcacctacatccccgacaagactgggcgctatatgattggagtcacctacgggggtgacgacatcccactttctccttatcgcatccgagccacacagacgggtgatgccagcaagtgcctggccacgggtcctggaatcgcctccactgtgaaaactggcgaagaagtaggctttgtggttgatgccaagactgccgggaagggtaaagtgacctgcacggttctgaccccagatggcactgaggccgaggccgatgtcattgagaatgaagatggaacctatgacatcttctacacagctgccaagccgggcacatatgtgatctatgtgcgcttcggtggtgttgatattcctaacagccccttcactgtcatggccacagatggggaagtcacagccgtggaggaggcaccggtaaatgcatgtccccctggattcaggccctgggtgaccgaagaggcctatgtcccagtgagtgacatgaacggcctgggatttaagccttttgacctggtcattccgtttgctgtcaggaaaggagaaatcactggagaggtccacatgccttctgggaagacagccacacctgagattgtggacaacaaggacggcacggtcactgttagatatgcccccactgaggtcgggctccatgagatgcacatcaaatacatgggcagccacatccctgagagcccactccagttctacgtgaactaccccaacagtggaagtgtttctgcatacggtccaggcctcgtgtatggagtggccaacaaaactgccaccttcaccatcgtcacagaggatgcaggagaaggtggtctggacttggctattgagggcccctcaaaagcagaaatcagctgcattgacaataaagatgggacatgcacagtgacctacctgccgactctgccaggcgactacagcattctggtcaagtacaatgacaagcacatccctggcagccccttcacagccaagatcacagatgacagcaggcggtgctcccaggtgaagttgggctcagccgctgacttcctgctcgacatcagtgagactgacctcagcagcctgacggccagcattaaggccccatctggccgagacgagccctgtctcctgaagaggctgcccaacaaccacattggcatctccttcatcccccgggaagtgggcgaacatctggtcagcatcaagaaaaatggcaaccatgtggccaacagccccgtgtctatcatggtggtccagtcggagattggtgacgcccgccgagccaaagtctatggccgcggcctgtcagaaggccggactttcgagatgtctgacttcatcgtggacacaagggatgcaggttatggtggcatatccttggcggtggaaggccccagcaaagtggacatccagacggaggacctggaagatggcacctgcaaagtctcctacttccctaccgtgcctggggtttatatcgtctccaccaaattcgctgacgagcacgtgcctgggagcccatttaccgtgaagatcagtggggagggaagagtcaaagagagcatcacccgcaccagtcgggccccgtccgtggccactgtcgggagcatttgtgacctgaacctgaaaatcccagaaatcaacagcagtgatatgtcggcccacgtcaccagcccctctggccgtgtgactgaggcagagattgtgcccatggggaagaactcacactgcgtccggtttgtgccccaggagatgggcgtgcacacggtcagcgtcaagtaccgtgggcagcacgtcaccggcagccccttccagttcaccgtggggccacttggtgaaggaggcgcccacaaggtgcgggcaggaggccctggcctggagagaggagaagcgggagtcccagctgagttcagcatttggacccgggaagcaggcgctggaggcctctccatcgctgttgagggccccagtaaggccgagattacattcgatgaccataaaaatgggtcgtgcggtgtatcttatattgcccaagagcctggtaactacgaggtgtccatcaagttcaatgatgagcacatcccggaaagcccctacctggtgccggtcatcgcaccctccgacgacgcccgccgcctcactgttatgagccttcaggaatcgggattaaaagttaaccagccagcatcctttgctataaggttgaatggcgcaaaaggcaagattgatgcaaaggtgcacagcccctctggagccgtggaggagtgccacgtgtctgagctggagccagataagtatgctgttcgcttcatccctcatgagaatggtgtccacaccatcgatgtcaagttcaatgggagccacgtggttggaagccccttcaaagtgcgcgttggggagcctggacaagcggggaaccctgccctggtgtccgcctatggcacgggactcgaagggggcaccacaggtatccagtcggaattctttattaacaccacccgagcaggtccagggacattatccgtcaccatcgaaggcccatccaaggttaaaatggattgccaggaaacacctgaagggtacaaagtcatgtacacccccatggctcctggtaactacctgatcagtgtcaaatacggtgggcccaaccacatcgtgggcagtcccttcaaggccaaggtgacaggccagcgtctagttagccctggctcagccaacgagacctcatccatcctggtggagtcagtgaccaggtcgtctacagagacctgctatagcgccattcccaaggcatcctcggacgccagcaaggtgacctctaagggggcagggctctcaaaggcctttgtgggccagaagagttccttcctggtggactgcagcaaagctggctccaacatgctgctgatcggggtccatgggcccaccaccccctgcgaggaggtctccatgaagcatgtaggcaaccagcaatacaacgtcacatacgtcgtcaaggagaggggcgattatgtgctggctgtgaagtggggggaggaacacatccctggcagcccttttcatgtcacagtgccttaaaacagttttctcaaatcctggagagagttcttgtggttgcttttgttgcttgtttgtaattcattttatacaaagccctccagcctgtttgtggggctgaaaccccatccctaaaatattgctgttgtaaaatgccttcagaaataagtcctagactggactcttgagggacatattggagaatcttaagaaatgcaagcttgttcagggggctgagaagatcctgagtacactaggtgcaaaccagaactcttggtggaacagaccagccactgcagcagacagaccaggaacacaatgagactgacatttcaaaaaaacaaaactggctagcctgagctgctggttcactcttcagcatttatgaaacaaggctaggggaagatgggcagagaaaaaggggacacctagtttggttgtcatttggcaaaggagatgacttaaaatccgcttaatctcttccagtgtccgtgttaatgtatttggctattagatcactagcactgctttaccgctcctcatcgccaacacccccatgctctgtggccttcttacacttctcagagggcagagtggcagccgggcaccctacagaaactcagagggcagagtggcagccaggcccacatgtctctcaagtacctgtcccctcgctctggtgattatttcttgcagaatcaccacacgagaccatcccggcagtcatggttttgctttagttttccaagtccgtttcagtcccttccttggtctgaagaaattctgcagtggcgagcagtttcccacttgccaaagatcccttttaaccaacactagcccttgtttttaacacacgctccagcccttcatcagcctgggcagtcttaccaaaatgtttaaagtgatctcagaggggcccatggattaacgccctcatcccaaggtccgtcccatgacataacactccacacccgccccagccaacttcatgggtcactttttctggaaaataatgatctgtacagacaggacagaatgaaactcctgcggctctttggcctgaaagttgggaatggttgggggagagaagggcagcagcttattggtggtcttttcaccattggcagaaacagtgagagctgtgtggtgcagaaatccagaaatgaggtgtagggaattttgcctgccttcctgcagacctgagctggctttggaatgaggttaaagtgtcagggacgttgcctgagcccaaatgtgtagtgtggtctgggcaggcagacctttaggttttgctgcttagtcctgaggaagtggccactcttgtggcaggtgtagtatctggggcgagtgttgggggtaaaagcccaccctacagaaagtggaacagcccggacctgatgtgaaaggaccacgggtgttgtaagctgggaccggaaccaaactggaatcaaacgcgactgtaaattgtatcttataacttattaaataaaacattgctccgtaaaaaaaaaaa

SEQ ID NO: 9 - DNA, 2193 bp, Homo sapiens
cgatgatgattcagtggaatgggcccaagaccagcatttctgagaaggctcgggggctggctttgacctacagcctccgggacagggaacgtggtggtggtcgtgcacagattggtgtggtggatgatgaggccaaagccccggacctcatgcagatcatggaggctgtgctgggctgcagggtgggcagcctgcgtgccgccacgcccagcaaggatatcaaccagctgcagaaggccaatgttcgcctgtaccatgtctatgagaagggcaaagacctggtggtcctggagttggcgacccccccactgacccaggacctgctgcaggaggaggacttctacatcctggaccagggtggcttcaagatctatgtgtggcagggacgcatgtctagcctccaggagagaaaggctgccttcagccgggctgtgggcttcatccaggccaagggctacccgacctacaccaacgtggaggtggtgaacgacggcgccgagtcggccgcgttcaagcagctcttccggacttggtctgagaagcggcgcaggaaccagaagctcggcgggagggataaatcgattcatgtaaagctggacgtgggcaagctgcacacccagcctaagttagcggcccagctcaggatggtggacgacggctctgggaaggtggaggtgtggtgcatccaggacttacacaggcagcccgtggaccccaagcgtcatggacagctgtgtgcaggcaactgctaccttgtgctctacacataccagaggctgggccgtgttcagtacatcctgtacctatggcagggccaccaggccactgcggatgagattgaggccctgaacagcaacgctgaggaactagatgtcatgtatggtggcgtcctagtacaggagcatgtgaccatgggcagcgagcccccccacttcctcgccatcttccagggccagctggtgatcttccaggagagagctgggcaccatggaaaggggcagtcagcatccaccacaaggcttttccaagtgcaaggcactgacagccacaacaccaggaccatggaggtgccagcccgtgcctcatccctcaactccagtgacatcttcttgctggtcacagccagcgtctgctacctctggtttgggaagggctgtaatggtgatcagcgtgagatggcacgggtggtggtcactgtcatttccaggaagaatgaggaaacggtgctggagggtcaggagcctccccacttctgggaggccctgggaggccgggccccctaccccagcaacaagaggctccctgaggaggtccccagcttccagccacgactgtttgagtgctccagccacatgggctgcctggtcctcgcagaagtggggttcttcagccaggaggacctggacaagtatgacatcatgttactggacacctggcaggagatcttcctgtggcttggggaagctgcaagtgagtggaaggaggcggtggcctggggccaggagtacctgaagactcacccagcagggaggagcccggccacacccatcgtgctggtcaagcagggccatgagcctcccaccttcattggatggttcttcacttgggacccctacaagtggactagccacccgtcccacaaggaagtggtggatggcagcccggcagcagcatcaaccatctctgagataacagcagaagtcaacaacttgcggctatccagatggccgggcaatggcagggcaggtgccgtggccctgcaggccctcaagggctcccaggacagctcagagaatgatctggtgcgaagccccaagtcggctggcagcagaaccagcagctccgtcagcagcaccagcgccacgatcaacgggggcctgcgccgggaacaactgatgcaccaggctgttgaggacctgccagagggcgtggaccctgcccgcagggagttctatctctcagactctgacttccaagatatctttgggaaatccaaggaggaattctacagcatggccacgtggaggcagcggcaggagaaaaagcagctgggcttcttctgaacccaagccctctcgactgcccctatcccctggaccccaacatacctacaatgctggggaggccctgcttccactcccctcagaggcttttggtcatcctctgcgtgtcagtaaaagcaggcagcccata

SEQ ID NO: 10 - DNA, 2089 bp, Homo sapiens
gcggccgctccgtgtgccctggactcgccgcccgcggctcggaagctggagagtcagcgacggggcccgactgcgggaccgagggctgcaagaagaagcgaacaaatagtccccagcgcctcctctggatgcggtcgcgtctgtggtcctggcagccgctgggcgggccaggccaggtcgggccgggccgagccgggcacatggacctgggcctgcgggctctaattgcggcgcttatgttgatgattttttttttaatcacagcagcccccagtttagcggactgatttactcccggtattggtaaatatgatcacgtgggccgcgcgaccaatggtggaggctgcagcctgcgaactagtcggtggctcgggcgccggcggggagctgctcggcggcggacagtgtaatgttgggtgggagtgcgggacgcctcaaaatgtcttccagtggcaccctcagcaactactacgtggactcgcttataggccatgagggcgacgaggtgttcgcggcgcgcttcgggccgccggggccaggcgcgcagggccggcctgcaggtgtggctgatggcccggccgccaccgccgccgagttcgcctcgtgtagttttgcccccagatcggccgtgttctctgcctcgtggtccgcggtgccctcccagcccccggcagcggcggcgatgagcggcctctaccacccgtacgttcccccgccgcccctggccgcctctgcctccgagcccggccgctacgtgcgctcctggatggagccgctgcccggcttcccgggcggtgcgggcggtggcggtggtggtggaggcggcggtccgggccgcggtcccagccctggccccagcggcccagccaacgggcgccactacgggattaagcctgaaacccgagcggccccggcccccgccacggccgcctccaccacctcctcctcctccacttccttatcctcctcctccaaacggactgagtgctccgtggcccgggagtcccaggggagcagcggccccgagttctcgtgcaactcgttcctgcaggagaaggcggcagcggcgacggggggaaccgggcctggggcagggatcggggccgcgactgggacgggcggctcgtcggagccctcagcttgcagcgaccacccgatcccaggctgttcgctgaaggaggaggagaagcagcattcgcagccgcagcagcagcaacttgacccaaacaaccccgccgcgaactggatccacgctcgctccacccggaaaaagcgctgtccctacaccaaataccagacgcttgagctggagaaagaattcctcttcaacatgtacctcacccgggaccggcgctacgaggtggccaggattctcaacctaacagagagacaggtcaaaatctggtttcagaaccgtaggatgaaaatgaaaaagatgagcaaggagaaatgccccaaaggagactgacccggcgcggtgctggcgggagcgctcaagggcagcggatttgttgttgttgctgttttcctttgtgggtgtttggtgcttgatttccagaaactctccagcgacttggacttcttcttctttttttttttctttttagatagaagtgactgtgtggttggtctctgaggtatttgggggactctgtatttgctcgtttacgtgttggaaaaaccaagtggctttggggtttcgccctatcccactccctctctttcctgctccattggttccttaagaaatgctatattttgtgagtgcaagctggcttggggagccctctcttgtgtaaatgtcccccatgtttctgaaaagtgctgtagtttagtcccctcacccccagcactgcccaaacaggggccaagtgcgccccaattccaagaatgaaggcagagcgacaacagtgcggacaccccggctgctagcccacggtgaagcccggcggggttgcccaccagttgcgaaagccccctttcctcagggagcacgcgggacctcggtggagatctccagtgaggcttagaggagcccagggcctcgggcgggttggggtttgtcctcagtgcattggacgcgctgctc

SEQ ID NO: 11 - DNA, 8019 bp, Homo sapiens
gcggcccggtgcgggtgtcggggagaccgggctctctgcccggcgcggcgcggcgcggctcggcccacgagcgaccaccgacatggagtgggctcgggcggccaagtagccgcttctccggagcccggtgccagtgccgcccgcagcccgccttccacccccggccgcgccgccggtcaggccctagggtgaagccgggaggaaaatgaagagttttcaccggaatccgttgaaaataggactgactgcaaagccttaaagaaagaaggacctcgggaggagaaacgaaaagccgcctccgggcaagacttggcgtgctccgagccgaggggctgcttcagggacctcgccccctccctttcccgctggagaaattgccgctgatgcattatccaagtggtggttgggaggatttgcagcaacatttttggttttccctcccccttctatgcattctgtttttttcctcccttttctgtttttcttcttcccgggaagtgaattgctgatgcaaatcggactttattcattaatgatgcaaccggattcgtttcaggattacgttgcacgagttgaattttgaatgaaggagaagagtttttttttttttttttaaagaagtgttgactctctagttcgttgtacttttaattattattttatttaaatatacgacttaattgtattcttttaaaaatgcattaagtatatattttatggtaatttaccctcaaaatatatgtatatgggtgaaattgaagacgcttcagttaagtgaggttactggtgtgttggatgtttaattcagcaccagcattgcatgacagttgtttgaataacaagtggtttatttttaaaaccataccttttaaaatttaggttcagataatagtaaaagtcatcataataatttaaaggaaaaccagcagaaatcgaagcaaacatgtctggagaagtgcgtttgaggcagttggagcagtttattttggacgggcccgctcagaccaatgggcagtgcttcagtgtggagacattactggatatactcatctgcctttatgatgaatgcaataattctccattgagaagagagaagaacattctcgaatacctagaatgggctaaaccatttacttctaaagtgaaacaaatgcgattacatagagaagactttgaaatattaaaggtgattggtcgaggagcttttggggaggttgctgtagtaaaactaaaaaatgcagataaagtgtttgccatgaaaatattgaataaatgggaaatgctgaaaagagctgagacagcatgttttcgtgaagaaagggatgtattagtgaatggagacaataaatggattacaaccttgcactatgctttccaggatgacaataacttatacctggttatggattattatgttggtggggatttgcttactctactcagcaaatttgaagatagattgcctgaagatatggctagattttacttggctgagatggtgatagcaattgactcagttcatcagctacattatgtacacagagacattaaacctgacaatatactgatggatatgaatggacatattcggttagcagattttggttcttgtctgaagctgatggaagatggaacggttcagtcctcagtggctgtaggaactccagattatatctctcctgaaatccttcaagccatggaagatggaaaagggagatatggacctgaatgtgactggtggtctttgggggtctgtatgtatgaaatgctttacggagaaacaccattttatgcagaatcgctggtggagacatacggaaaaatcatgaaccacaaagagaggtttcagtttccagcccaagtgactgatgtgtctgaaaatgctaaggatcttattcgaaggctcatttgtagcagagaacatcgacttggtcaaaatggaatagaagactttaagaaacacccatttttcagtggaattgattgggataatattcggaactgtgaagcaccttatattccagaagttagtagcccaacagatacatcgaattttgatgtagatgatgattgtttaaaaaattctgaaacgatgcccccaccaacacatactgcattttctggccaccatctgccatttgttggttttacatatactagtagctgtgtactttctgatcggagctgtttaagagttacggctggtcccacctcactggatcttgatgttaatgttcagaggactctagacaacaacttagcaactgaagcttatgaaagaagaattaagcgccttgagcaagaaaaacttgaactcagtagaaaacttcaagagtcaacacagactgtccaagctctgcagtattcaactgttgatggtccactaacagcaagcaaagatttagaaataaaaaacttaaaagaagaaattgaaaaactaagaaaacaagtaacagaatcaagtcatttggaacagcaacttgaagaagctaatgctgtgaggcaagaactagatgatgcttttagacaaatcaaggcttatgaaaaacaaatcaaaacgttacaacaagaaagagaagatctaaataaggaactagtccaggctagtgagcgattaaaaaaccaatccaaagagctgaaagacgcacactgtcagaggaaactggccatgcaggaattcatggagatcaatgagcggctaacagaattgcacacccaaaaacagaaacttgctcgccatgtccgagataaggaagaagaggtggacctggtgatgcaaaaagttgaaagcttaaggcaagaactgcgcagaacagaaagagccaaaaaagagctggaagttcatacagaagctctagctgctgaagcatctaaagacaggaagctacgtgaacagagtgagcactattctaagcaactggaaaatgaattggagggactgaagcaaaaacaaattagttactcaccaggagtatgcagcatagaacatcagcaagagataaccaaactaaagactgatttggaaaagaaaagtatcttttatgaagaagaattatctaaaagagaaggaatacatgcaaatgaaataaaaaatcttaagaaagaactgcatgattcagaaggtcagcaacttgctctcaacaaagaaattatgattttaaaagacaaattggaaaaaaccagaagagaaagtcaaagtgaaagggaggaatttgaaagtgagttcaaacaacaatatgaacgagaaaaagtgttgttaactgaagaaaataaaaagctgacgagtgaacttgataagcttactactttgtatgagaacttaagtatacacaaccagcagttagaagaagaggttaaagatctagcagacaagaaagaatcagttgcacattgggaagcccaaatcacagaaataattcagtgggtcagcgatgaaaaggatgcacgagggtatcttcaggccttagcttctaaaatgactgaagaattggaggcattaagaaattccagcttgggtacacgagcaacagatatgccctggaaaatgcgtcgttttgcgaaactggatatgtcagctagactggagttgcagtcggctctggatgcagaaataagagccaaacaggccatccaagaagagttgaataaagttaaagcatctaatatcataacagaatgtaaactaaaagattcagagaagaagaacttggaactactctcagaaatcgaacagctgataaaggacactgaagagcttagatctgaaaagggtatagagcaccaagactcacagcattctttcttggcatttttgaatacgcctaccgatgctctggatcaatttgaaactgtagactccactccactttcagttcacacaccaaccttaaggaaaaaaggatgtcctggttcaactggctttccacctaagcgcaagactcaccagttttttgtaaaatcttttactactcctaccaagtgtcatcagtgtacctccttgatggtgggtttaataagacagggctgttcatgtgaagtgtgtggattctcatgccatataacttgtgtaaacaaagctccaaccacttgtccagttcctcctgaacagacaaaaggtcccctgggtatagatcctcagaaaggaataggaacagcatatgaaggtcatgtcaggattcctaagccagctggagtgaagaaagggtggcagagagcactggctatagtgtgtgacttcaaactctttctgtacgatattgctgaaggaaaagcatctcagcccagtgttgtcattagtcaagtgattgacatgagggatgaagaattttctgtgagttcagtcttggcttctgatgttatccatgcaagtcggaaagatataccctgtatatttagggtcacagcttcccagctctcagcatctaataacaaatgttcaatcctgatgctagcagacactgagaatgagaagaataagtgggtgggagtgctgagtgaattgcacaagattttgaagaaaaacaaattcagagaccgctcagtctatgttcccaaagaggcttatgacagcactctacccctcattaaaacaacccaggcagccgcaatcatagatcatgaaagaattgctttgggaaacgaagaagggttatttgttgtacatgtcaccaaagatgaaattattagagttggtgacaataagaagattcatcagattgaactcattccaaatgatcagcttgttgctgtgatctcaggacgaaatcgtcatgtacgactttttcctatgtcagcattggatgggcgagagaccgatttttacaagctgtcagaaactaaagggtgtcaaaccgtaacttctggaaaggtgcgccatggagctctcacatgcctgtgtgtggctatgaaaaggcaggtcctctgttatgaactatttcagagcaagacccgtcacagaaaatttaaagaaattcaagtcccatataatgtccagtggatggcaatcttcagtgaacaactctgtgtgggattccagtcaggatttctaagataccccttgaatggagaaggaaatccatacagtatgctccattcaaatgaccatacactatcatttattgcacatcaaccaatggatgctatctgcgcagttgagatctccagtaaagaatatctgctgtgttttaacagcattgggatatacactgactgccagggccgaagatctagacaacaggaattgatgtggccagcaaatccttcctcttgttgttacaatgcaccatatctctcggtgtacagtgaaaatgcagttgatatctttgatgtgaactccatggaatggattcagactcttcctctcaaaaaggttcgacccttaaacaatgaaggatcattaaatcttttagggttggagaccattagattaatatatttcaaaaataagatggcagaaggggacgaactggtagtacctgaaacatcagataatagtcggaaacaaatggttagaaacattaacaataagcggcgttattccttcagagtcccagaagaggaaaggatgcagcagaggagggaaatgctacgagatccagaaatgagaaataaattaatttctaatccaactaattttaatcacatagcacacatgggtcctggagatggaatacagatcctgaaagatctgcccatgaaccctcggcctcaggaaagtcggacagtattcagtggctcagtcagtattccatctatcaccaaatcccgccctgagccaggccgctccatgagtgctagcagtggcttgtcagcaaggtcatccgcacagaatggcagcgcattaaagagggaattctctggaggaagctacagtgccaagcggcagcccatgccctccccgtcagagggctctttgtcctctggaggcatggaccaaggaagtgatgccccagcgagggactttgacggagaggactctgactctccgaggcattccacagcttccaacagttccaacctaagcagccccccaagcccagcttcaccccgaaaaaccaagagcctctccctggagagcactgaccgcgggagctgggacccgtgagctgcctcagcactgggacctctcgctctccgctccctgccactcgcctcctctcactttcatctcttccctccacctcgcctgctcggcctgaaagccaccaggggctggcagcagtagcaggacagggattcaggagttctgacgacacgactctcagatccacgcccccagcctaacagcaacaacaaagacagactttccgtagcagcttagattaacgttgatttcattccatgcacttagagttgctttcagtaacattttacccctactcccaaaggtagcttaaatagacagattacacaaatgtaagtgataagaataagattagacagattttgctttcacagtagagtctcattatagtcctaaaatagctcatgggcttctccgcatccagaagggagaattggtccctggagtggctcactaagctcttaatcagcaaacgcagtgagtatcaacctgattgttgccaggaaatccttatgaattaaaacaatgcatattttactacagtacagagtttaaatgaatacataaatgtagaagtactgaatgtatatatttaaaaggagcctcttgtattcaacaaaagatggatgcatatataagagagatgatttaatttaaagaaatatgttgtttcttgtctgtaatgtaatgtaaagggtggaaaggcctcaagctcacatttgtagagagagagcgagagaaatcagagttccctttattgccctgtcctcaaactggtcataggctctagtcacctggggagctgtagaaaacacttgcagagccaggttttgctggtttggggcatgccctgggcaccagagctttaacatttgaagccacttcagcagcagcagcaaaaggcgaactcatctctacccaagatgtttcttttcctagtggtggaatttgaacacttctcactttttattgtattttatcttccgcagataaatgtagaaatacacgattctgtcacctctgatcccttccatctgaaaggttacaaggagtgttgtagcttctgaaggtgcagaaaacaatttctaaaaatgcttttattcctgggctaatcctgtccctccctaagtcacagcgaggtgtctgtcccagggctggagatgcttcccaaggaggagtctgttttgttgagagtgggcgtgggcttcttcacataagcctggggaaggaagaaaaaacggctttcattaccaaataatgtaaaacctcaaaagcaagggcttcaacagccttaaccaaatattattccccatagccagtggaaaatggatgtgacaaccccagtgcgcaggccagagtgagtgagcccagcacggcgctccgactggcttcctctctcaggtgctggattgtggggttagtggcatttccagctggattcctcctgttgtagttgccataaggaaatgagatgcagaatcagaaggatctatttctacagaatcatttcaccagttaagcacatgagtagagaaagagataaaaataaaagtatctcatgaaggaaagagattttgcctctcttttacttttcacctaagtttctctgagaaatagagacaggattctctctttaaaattcagtgaaaatgaagaaagttttcctgcagttgctaacctgagttgcagtgtttaaggccatcatttcactgctgctgtctgtgactccacgtctgtgtcactgaggtgacctgcgtgtcactgaggtggccaccatgctggcctgcggcatgtgcagggagctgaggctgtttccaggtgatgctgctgtgtggagaaggttctgagatgcagtgagggaagaaaggatcctgctggggattccattgtaagcacctataatcgggaattttcatgtaacagctttgacatttaaa

SEQ ID NO: 12 - DNA, 7776 bp, Homo sapiens
gcggcccggtgcgggtgtcggggagaccgggctctctgcccggcgcggcgcggcgcggctcggcccacgagcgaccaccgacatggagtgggctcgggcggccaagtagccgcttctccggagcccggtgccagtgccgcccgcagcccgccttccacccccggccgcgccgccggtcaggccctagggtgaagccgggaggaaaatgaagagttttcaccggaatccgttgaaaataggactgactgcaaagccttaaagaaagaaggacctcgggaggagaaacgaaaagccgcctccgggcaagacttggcgtgctccgagccgaggggctgcttcagggacctcgccccctccctttcccgctggagaaattgccgctgatgcattatccaagtggtggttgggaggatttgcagcaacatttttggttttccctcccccttctatgcattctgtttttttcctcccttttctgtttttcttcttcccgggaagtgaattgctgatgcaaatcggactttattcattaatgatgcaaccggattcgtttcaggattacgttgcacgagttgaattttgaatgaaggagaagagtttttttttttttttttaaagaagtgttgactctctagttcgttgtacttttaattattattttatttaaatatacgacttaattgtattcttttaaaaatgcattaagtatatattttatggtaatttaccctcaaaatatatgtatatgggtgaaattgaagacgcttcagttaagtgaggttactggtgtgttggatgtttaattcagcaccagcattgcatgacagttgtttgaataacaagtggtttatttttaaaaccataccttttaaaatttaggttcagataatagtaaaagtcatcataataatttaaaggaaaaccagcagaaatcgaagcaaacatgtctggagaagtgcgtttgaggcagttggagcagtttattttggacgggcccgctcagaccaatgggcagtgcttcagtgtggagacattactggatatactcatctgcctttatgatgaatgcaataattctccattgagaagagagaagaacattctcgaatacctagaatgggctaaaccatttacttctaaagtgaaacaaatgcgattacatagagaagactttgaaatattaaaggtgattggtcgaggagcttttggggaggttgctgtagtaaaactaaaaaatgcagataaagtgtttgccatgaaaatattgaataaatgggaaatgctgaaaagagctgagacagcatgttttcgtgaagaaagggatgtattagtgaatggagacaataaatggattacaaccttgcactatgctttccaggatgacaataacttatacctggttatggattattatgttggtggggatttgcttactctactcagcaaatttgaagatagattgcctgaagatatggctagattttacttggctgagatggtgatagcaattgactcagttcatcagctacattatgtacacagagacattaaacctgacaatatactgatggatatgaatggacatattcggttagcagattttggttcttgtctgaagctgatggaagatggaacggttcagtcctcagtggctgtaggaactccagattatatctctcctgaaatccttcaagccatggaagatggaaaagggagatatggacctgaatgtgactggtggtctttgggggtctgtatgtatgaaatgctttacggagaaacaccattttatgcagaatcgctggtggagacatacggaaaaatcatgaaccacaaagagaggtttcagtttccagcccaagtgactgatgtgtctgaaaatgctaaggatcttattcgaaggctcatttgtagcagagaacatcgacttggtcaaaatggaatagaagactttaagaaacacccatttttcagtggaattgattgggataatattcggaactgtgaagcaccttatattccagaagttagtagcccaacagatacatcgaattttgatgtagatgatgattgtttaaaaaattctgaaacgatgcccccaccaacacatactgcattttctggccaccatctgccatttgttggttttacatatactagtagctgtgtactttctgatcggagctgtttaagagttacggctggtcccacctcactggatcttgatgttaatgttcagaggactctagacaacaacttagcaactgaagcttatgaaagaagaattaagcgccttgagcaagaaaaacttgaactcagtagaaaacttcaagagtcaacacagactgtccaagctctgcagtattcaactgttgatggtccactaacagcaagcaaagatttagaaataaaaaacttaaaagaagaaattgaaaaactaagaaaacaagtaacagaatcaagtcatttggaacagcaacttgaagaagctaatgctgtgaggcaagaactagatgatgcttttagacaaatcaaggcttatgaaaaacaaatcaaaacgttacaacaagaaagagaagatctaaataagctggaagttcatacagaagctctagctgctgaagcatctaaagacaggaagctacgtgaacagagtgagcactattctaagcaactggaaaatgaattggagggactgaagcaaaaacaaattagttactcaccaggagtatgcagcatagaacatcagcaagagataaccaaactaaagactgatttggaaaagaaaagtatcttttatgaagaagaattatctaaaagagaaggaatacatgcaaatgaaataaaaaatcttaagaaagaactgcatgattcagaaggtcagcaacttgctctcaacaaagaaattatgattttaaaagacaaattggaaaaaaccagaagagaaagtcaaagtgaaagggaggaatttgaaagtgagttcaaacaacaatatgaacgagaaaaagtgttgttaactgaagaaaataaaaagctgacgagtgaacttgataagcttactactttgtatgagaacttaagtatacacaaccagcagttagaagaagaggttaaagatctagcagacaagaaagaatcagttgcacattgggaagcccaaatcacagaaataattcagtgggtcagcgatgaaaaggatgcacgagggtatcttcaggccttagcttctaaaatgactgaagaattggaggcattaagaaattccagcttgggtacacgagcaacagatatgccctggaaaatgcgtcgttttgcgaaactggatatgtcagctagactggagttgcagtcggctctggatgcagaaataagagccaaacaggccatccaagaagagttgaataaagttaaagcatctaatatcataacagaatgtaaactaaaagattcagagaagaagaacttggaactactctcagaaatcgaacagctgataaaggacactgaagagcttagatctgaaaagggtatagagcaccaagactcacagcattctttcttggcatttttgaatacgcctaccgatgctctggatcaatttgaaactgtagactccactccactttcagttcacacaccaaccttaaggaaaaaaggatgtcctggttcaactggctttccacctaagcgcaagactcaccagttttttgtaaaatcttttactactcctaccaagtgtcatcagtgtacctccttgatggtgggtttaataagacagggctgttcatgtgaagtgtgtggattctcatgccatataacttgtgtaaacaaagctccaaccacttgtccagttcctcctgaacagacaaaaggtcccctgggtatagatcctcagaaaggaataggaacagcatatgaaggtcatgtcaggattcctaagccagctggagtgaagaaagggtggcagagagcactggctatagtgtgtgacttcaaactctttctgtacgatattgctgaaggaaaagcatctcagcccagtgttgtcattagtcaagtgattgacatgagggatgaagaattttctgtgagttcagtcttggcttctgatgttatccatgcaagtcggaaagatataccctgtatatttagggtcacagcttcccagctctcagcatctaataacaaatgttcaatcctgatgctagcagacactgagaatgagaagaataagtgggtgggagtgctgagtgaattgcacaagattttgaagaaaaacaaattcagagaccgctcagtctatgttcccaaagaggcttatgacagcactctacccctcattaaaacaacccaggcagccgcaatcatagatcatgaaagaattgctttgggaaacgaagaagggttatttgttgtacatgtcaccaaagatgaaattattagagttggtgacaataagaagattcatcagattgaactcattccaaatgatcagcttgttgctgtgatctcaggacgaaatcgtcatgtacgactttttcctatgtcagcattggatgggcgagagaccgatttttacaagctgtcagaaactaaagggtgtcaaaccgtaacttctggaaaggtgcgccatggagctctcacatgcctgtgtgtggctatgaaaaggcaggtcctctgttatgaactatttcagagcaagacccgtcacagaaaatttaaagaaattcaagtcccatataatgtccagtggatggcaatcttcagtgaacaactctgtgtgggattccagtcaggatttctaagataccccttgaatggagaaggaaatccatacagtatgctccattcaaatgaccatacactatcatttattgcacatcaaccaatggatgctatctgcgcagttgagatctccagtaaagaatatctgctgtgttttaacagcattgggatatacactgactgccagggccgaagatctagacaacaggaattgatgtggccagcaaatccttcctcttgttgttacaatgcaccatatctctcggtgtacagtgaaaatgcagttgatatctttgatgtgaactccatggaatggattcagactcttcctctcaaaaaggttcgacccttaaacaatgaaggatcattaaatcttttagggttggagaccattagattaatatatttcaaaaataagatggcagaaggggacgaactggtagtacctgaaacatcagataatagtcggaaacaaatggttagaaacattaacaataagcggcgttattccttcagagtcccagaagaggaaaggatgcagcagaggagggaaatgctacgagatccagaaatgagaaataaattaatttctaatccaactaattttaatcacatagcacacatgggtcctggagatggaatacagatcctgaaagatctgcccatgaaccctcggcctcaggaaagtcggacagtattcagtggctcagtcagtattccatctatcaccaaatcccgccctgagccaggccgctccatgagtgctagcagtggcttgtcagcaaggtcatccgcacagaatggcagcgcattaaagagggaattctctggaggaagctacagtgccaagcggcagcccatgccctccccgtcagagggctctttgtcctctggaggcatggaccaaggaagtgatgccccagcgagggactttgacggagaggactctgactctccgaggcattccacagcttccaacagttccaacctaagcagccccccaagcccagcttcaccccgaaaaaccaagagcctctccctggagagcactgaccgcgggagctgggacccgtgagctgcctcagcactgggacctctcgctctccgctccctgccactcgcctcctctcactttcatctcttccctccacctcgcctgctcggcctgaaagccaccaggggctggcagcagtagcaggacagggattcaggagttctgacgacacgactctcagatccacgcccccagcctaacagcaacaacaaagacagactttccgtagcagcttagattaacgttgatttcattccatgcacttagagttgctttcagtaacattttacccctactcccaaaggtagcttaaatagacagattacacaaatgtaagtgataagaataagattagacagattttgctttcacagtagagtctcattatagtcctaaaatagctcatgggcttctccgcatccagaagggagaattggtccctggagtggctcactaagctcttaatcagcaaacgcagtgagtatcaacctgattgttgccaggaaatccttatgaattaaaacaatgcatattttactacagtacagagtttaaatgaatacataaatgtagaagtactgaatgtatatatttaaaaggagcctcttgtattcaacaaaagatggatgcatatataagagagatgatttaatttaaagaaatatgttgtttcttgtctgtaatgtaatgtaaagggtggaaaggcctcaagctcacatttgtagagagagagcgagagaaatcagagttccctttattgccctgtcctcaaactggtcataggctctagtcacctggggagctgtagaaaacacttgcagagccaggttttgctggtttggggcatgccctgggcaccagagctttaacatttgaagccacttcagcagcagcagcaaaaggcgaactcatctctacccaagatgtttcttttcctagtggtggaatttgaacacttctcactttttattgtattttatcttccgcagataaatgtagaaatacacgattctgtcacctctgatcccttccatctgaaaggttacaaggagtgttgtagcttctgaaggtgcagaaaacaatttctaaaaatgcttttattcctgggctaatcctgtccctccctaagtcacagcgaggtgtctgtcccagggctggagatgcttcccaaggaggagtctgttttgttgagagtgggcgtgggcttcttcacataagcctggggaaggaagaaaaaacggctttcattaccaaataatgtaaaacctcaaaagcaagggcttcaacagccttaaccaaatattattccccatagccagtggaaaatggatgtgacaaccccagtgcgcaggccagagtgagtgagcccagcacggcgctccgactggcttcctctctcaggtgctggattgtggggttagtggcatttccagctggattcctcctgttgtagttgccataaggaaatgagatgcagaatcagaaggatctatttctacagaatcatttcaccagttaagcacatgagtagagaaagagataaaaataaaagtatctcatgaaggaaagagattttgcctctcttttacttttcacctaagtttctctgagaaatagagacaggattctctctttaaaattcagtgaaaatgaagaaagttttcctgcagttgctaacctgagttgcagtgtttaaggccatcatttcactgctgctgtctgtgactccacgtctgtgtcactgaggtgacctgcgtgtcactgaggtggccaccatgctggcctgcggcatgtgcagggagctgaggctgtttccaggtgatgctgctgtgtggagaaggttctgagatgcagtgagggaagaaaggatcctgctggggattccattgtaagcacctataatcgggaattttcatgtaacagctttgacatttaaa

SEQ ID NO: 13 - DNA, 2757 bp, Homo sapiens
attgtaaactagtttttggtttgcaaaaaaaaaaaaaaaaaaaaaaaaaaaaaaaaaaaaaaaaaaaaaaaaggtcttttgtaactgacttctttcacttagcaaatggaagggtttttgatggaatcttagctcagatgtcgccctaggcttggccttctggaactcactgttctcttgcttccttccaccctgcctccctacccgctttgctacaagaagacagaatgtagaaacccccagttgactttttgagtagaaatgagccatgttctatttagtggtagaatgtttgctgggttagcccaggacttcagatggagtgcttcctcctttttaataccttgtgactgctgtgttggcaagcagagggttaaatgctgcaggaggacatgggagagtttttgctttgagggtccactggagcaagagaagcttgagagtctgtctctgagatcccagaacagacatgaagatatggtaccgattcccttggtgctaaaaggaactccaggggaatttcaggaaacccctccttttctcgtctttattctcaccccgtccccccgccacctctctccccaagttcacactcaggagggaggaatcttttaccttttccgttctgggcagcagcctgtagggaatgttatcagtgttgggactgggcacgggaccaagccttcctggtgcctggactgcaacctagctgagagctgacatggcagggcgagttgtgtgtgagttggctgcccctaggctcataggcctagcacaatagagaccctgtcaatggagggacactatcaggcaggtcactatcaatgtgacagacactatcaggcaggtcacattggtgcagatccttggaggactcccccccaccccccatgagtggattcctccaggtcaggggctggctgggactgtggatgctggagtaagtggaattgtgggtgcactctgcttcagcagtactctccaaggagaatgattgttttaataaattactgttttaataagggaggtggaagagctttttaatcacttgctttttaaaaatttttaattttattttaattaattagtttatttattttttgagacggagtcttgctctgtcgcccaggctggagtgcagtggcacgatctcggctcactgcacctctgcctcctggattcacaccattctcctgcctcagcctccagagtagctgggactacaggcacccgccaccacgcccgactaattttttgtatttttagcagagacggggtttcaccgtgttagccaggatggtgtagatctcctgaccttgtgatcctcccgcctcagccttccaaagggagggattactggcgtgagtcaccgcgcctggcctttattttttatttcttttgagatggagttttgctctgtcacccaggctggagtaccggtggtgggatctcgcctcactgcaacttgcgcctcccgggttcaagcgattctccagcctcagcctcctgagtagctgggattacaggcgtgtgccaccgcctccagctaatttttgtatttttagtagagaccgggcttcaccatgttggccaggctggtctcgaactcctgacctcaggtgagcgtcctgccttggcctcccaaagtgctgggattacaggcgtgagccactacacccagccaatcagttgcttttaaactacttaaataaaaagagccaacccaaaatcttgtgcatgcttgggaaactggcagtggaatatgagaagtttttatttgtggtgcacacaggtgactcgggctgttgtgtattggttcttgcctcgatctgtagcaagcaatctgttgtttcttgcctgccttttgggaagaaatgaaaaaagaagcagcacgagtctccatacatcatgattgtgatggcactgggcctgagaccttttctgctgtccaggtaaaaatgtgaagaccatggttttgaggtttcttaataaattcaggtgttaagtgccaagtgatgctcccagcccctgagctagagcaactatgctgttcatgtccccaggaatggaagtggaccctagttaggtgctggtggccagccatgtgtacctagggcagggccaggtcctgtgtgtgtgtgtgtgtgtgtgtgtgtgtgtgtgtgtgtgtgagagagagagagagagagagagagagacagagagagagatagagagaaacataaaggtgatcggcactcagacatcctgtgtggtccacctcacttctcaagcaggtgtctttccagtctacaactcgttgaccacaggtggaattcataagctctgttccctgtcctgcttgggtcctccagagaaagaaatgttgaattatcatcttggtgatggtcaactctgaaagcctaaattttcatgatcaccaaagtgtttggatttaaaagggtggctcactccgtaattccggcactttgggaggctgaggcagaaggatcacttgagcccagaagtttcagactaggctgggcaacaaagcaagacccggtctctcccaaaaaaaaaaaaaaaaaaaaaaaaaaaaaatcaaaaaaattagctgggggtggtggtgtgctcctatagctccagctactcaggaggctgaggcgggaggatcgcttgagcccaggggtttgcggctgcagtgagctgtgattgcaccactgcactccagcctgggcgactgtgagaccccgtctttaagaaaaaaaaaaaaaaaaa

SEQ ID NO: 14 - DNA, 2444 bp, Homo sapiens
ggttttttttttttaccccccttttttatttattatttttttgcacattgagcggatccttgggaacgagagaaaaaagaaacccaaactcacgcgtgcagaagatctccccccccttcccctcccctcctccctcttttcccctccccaggagaaaaagacccccaagcagaaaaaagttcaccttggactcgtctttttcttgcaatattttttgggggggcaaaactttgagggggtgattttttttggcttttcttcctccttcatttttcttccaaaattgctgctggtgggtgaaaaaaaaatgccgcagctgaacggcggtggaggggatgacctaggcgccaacgacgaactgatttccttcaaagacgagggcgaacaggaggagaagagctccgaaaactcctcggcagagagggatttagctgatgtcaaatcgtctctagtcaatgaatcagaaacgaatcaaaacagctcctccgattccgaggcggaaagacggcctccgcctcgctccgaaagtttccgagacaaatcccgggaaagtttggaagaagcggccaagaggcaagatggagggctctttaaggggccaccgtatcccggctaccccttcatcatgatccccgacctgacgagcccctacctccccaacggatcgctctcgcccaccgcccgaacctatctccagatgaaatggccactgcttgatgtccaggcagggagcctccagagtagacaagccctcaaggatgcccggtccccatcaccggcacacattgtctctaacaaagtgccagtggtgcagcaccctcaccatgtccaccccctcacgcctcttatcacgtacagcaatgaacacttcacgccgggaaacccacctccacacttaccagccgacgtagaccccaaaacaggaatcccacggcctccgcaccctccagatatatccccgtattacccactatcgcctggcaccgtaggacaaatcccccatccgctaggatggttagtaccacagcaaggtcaaccagtgtacccaatcacgacaggaggattcagacacccctaccccacagctctgaccgtcaatgcttccgtgtccaggttccctccccatatggtcccaccacatcatacgctacacacgacgggcattccgcatccggccatagtcacaccaacagtcaaacaggaatcgtcccagagtgatgtcggctcactccatagttcaaagcatcaggactccaaaaaggaagaagaaaagaagaagccccacataaagaaacctcttaatgcattcatgttgtatatgaaggaaatgagagcaaaggtcgtagctgagtgcacgttgaaagaaagcgcggccatcaaccagatccttgggcggaggtggcatgcactgtccagagaagagcaagcgaaatactacgagctggcccggaaggagcgacagcttcatatgcaactgtaccccggctggtccgcgcgggataactatggaaagaagaagaagaggaaaagggacaagcagccgggagagaccaatgaacacagcgaatgtttcctaaatccttgcctttcacttcctccgattacagacctcagcgctcctaagaaatgccgagcgcgctttggccttgatcaacagaataactggtgcggcccttgcaggagaaaaaaaaagtgcgttcgctacatacaaggtgaaggcagctgcctcagcccaccctcttcagatggaagcttactagattcgcctcccccctccccgaacctgctaggctcccctccccgagacgccaagtcacagactgagcagacccagcctctgtcgctgtccctgaagcccgaccccctggcccacctgtccatgatgcctccgccacccgccctcctgctcgctgaggccacccacaaggcctccgccctctgtcccaacggggccctggacctgcccccagccgctttgcagcctgccgccccctcctcatcaattgcacagccgtcgacttcttggttacattcccacagctccctggccgggacccagccccagccgctgtcgctcgtcaccaagtctttagaatagctttagcgtcgtgaaccccgctgctttgtttatggttttgtttcacttttcttaatttgccccccacccccaccttgaaaggttttgttttgtactctcttaattttgtgccatgtggctacattagttgatgtttatcgagttcattggtcaatatttgacccattcttatttcaatttctccttttaaatatgtagatgagagaagaacctcatgattggtaccaaaatttttatcaacagctgtttaaagtctttgtagcgtttaaaaaatatatatatatacataactgttatgtagttcggatagcttagttttaaaagactgattaaaaaacaaaaaaaa

SEQ ID NO: 15 - DNA, 1573 bp, Homo sapiens
cttccccggtgcagacacccggcgaagcccacccggttttcccagcggcatttccgatgacagcttcggggctacgtgtcctgtgctgtcggagacgcacaggaagcaaagtttgtgagaagccttgggggcgactttgccttgggcacccgcatttgtgcgtctgcgaggtgcctcggtgtgcgcggagctagtttcccagtttcccgggcccctcccttctccgagcccctctagcgatttgtttaggaaaagtgatgacatgaactagtagtggagaatcgcagcgccgctccccgccctggggagggaggggagccccggagagcctgccggtgggagctggaagcaggctcccggctgagcgccccagcccgaaaggcagggtctgggtgcgggaagagggctcggagctgccttcctgctgccttggggccgcccagatgagggaacagcccgatttgcctggttctgattctccaggctgtcgtggttgtggaatgcaaacgccagcacataatggaaacaggacctgaagacccttccagcatgccagaggaaagttcccccaggcggaccccgcagagcattccctaccaggacctccctcacctggtcaatgcagacggacagtacctcttctgcaggtactggaaacccacaggcacacccaaggccctcatctttgtgtcccatggagccggagagcacagtggccgctatgaagagctggctcggatgctgatggggctggacctgctggtgttcgcccacgaccatgttggccacggacagagcgaaggggagaggatggtagtgtctgacttccacgttttcgtcagggatgtgttgcagcatgtggattccatgcagaaagactaccctgggcttcctgtcttccttctgggccactccatgggaggcgccatcgccatcctcacggccgcagagaggccgggccacttcgccggcatggtactcatttcgcctctggttcttgccaatcctgaatctgcaacaactttcaaggtccttgctgcgaaagtgctcaaccttgtgctgccaaacttgtccctcgggcccatcgactccagcgtgctctctcggaataagacagaggtcgacatttataactcagaccccctgatctgccgggcagggctgaaggtgtgcttcggcatccaactgctgaatgccgtctcacgggtggagcgcgccctccccaagctgactgtgcccttcctgctgctccagggctctgccgatcgcctatgtgacagcaaaggggcctacctgctcatggagttagccaagagccaggacaagactctcaagatttatgaaggtgcctaccatgttctccacaaggagcttcctgaagtcaccaactccgtcttccatgaaataaacatgtgggtctctcaaaggacagccacggcaggaactgcgtccccaccctgaatgcattggccggtgcccggctcatggtctgggggatgcaggcaggggaagggcagagatggcttctcagatatggcttgcaaaaaaaaaaaaaaaaaaaaaaaaaaaaaaa

SEQ ID NO: 16 - DNA, 1695 bp, Homo sapiens
atgtggttctgcgcgtgtgcggacggctgtctgttaactccgcggtcagttcccggactggtggctggtctgcagggttgacctgcgcaatgcagaggctgcaggtagtgctgggccacctgaggggtccggccgattccggctggatgccgcaggccgcgccttgcctgagcggtgccccgcaggcctcggccgcggacgtggtggtggtgcacgggcggcgcacggccatctgccgggcgggccgcggcggcttcaaggacaccacccccgacgagcttctctcggcagtcatgaccgcggttctcaaggacgtgaatctgaggccggaacagctgggggacatctgtgtcggaaatgtgctgcagcctggggccggggcaatcatggcccgaatcgcccagtttctgagtgacatcccggagactgtgcctttgtccactgtcaatagacagtgttcgtcggggctacaggcagtggccagcatagcaggtggcatcagaaatgggtcttatgacattggcatggcctgtggggtggagtccatgtccctggctgacagagggaaccctggaaatattacttcgcgcttgatggagaaggagaaggccagagattgcctgattcctatggggataacctctgagaatgtggctgagcggtttggcatttcacgggagaagcaggatacctttgccctggcttcccagcagaaggcagcaagagcccagagcaagggctgtttccaagctgagattgtgcctgtgaccaccacggtccatgatgacaagggcaccaagaggagcatcactgtgacccaggatgagggtatccgccccagcaccaccatggagggcctggccaaactgaagcctgccttcaagaaagatggttctaccacagctggaaactctagccaggtgagtgatggggcagctgccatcctgctggcccggaggtccaaggcagaagagttgggccttcccatccttggggtcctgaggtcttatgcagtggttggggtcccacctgacatcatgggcattggacctgcctatgccatcccagtagctttgcaaaaagcagggctgacagtgagtgacgtggacatcttcgagatcaatgaggcctttgcaagccaggctgcctactgtgtggagaagctacgactcccccctgagaaggtgaaccccctggggggtgcagtggccttagggcacccactgggctgcactggggcacgacaggtcatcacgctgctcaatgagctgaagcgccgtgggaagagggcatacggagtggtgtccatgtgcatcgggactggaatgggagccgctgccgtctttgaataccctgggaactgagtgaggtcccaggctggaggcgctacgcagacagtcctgctgctctagcagcaaggcagtaacaccacaaaagcaaaaccacatgggaaaactcagcactggtggtggtggcagtggacagatcaaggcacttcaactcatttggaaaatgtgaacactgatgacatggtataggagtgggtggggtgttgagccacccatcagaccctctttagctgtgcaagataaaagcagcctgggtcacccaggccacaaggccatggttaattcttaaggcaaggcaaatccatggatgagaagtgcaatgggcatagtaaaagtgcatgaattt

SEQ ID NO: 17 - DNA, 1936 bp, Homo sapiens
ctggagtttgcggagggccgagccgggtgcgcacggggaggcggaggcagcggcggcggcggcggcggcggcggcggcggagcagatgaagaaactgaggccctgtgatgtgaagtgacttgccccccagccacacagctggaccattctggctgctgtctggacaagaagtcgtagggggtgagggtggaagctgggaaacccacaggaggcaaccacactagtttagatcttctggtgaccccacttctcgctgctcatgccgctgggactggggcggcggaaaaaggcgccccctctagtggaaaatgaggaggctgagccaggccgtggagggctgggcgtgggggagccagggcctctgggcggaggtgggtcggggggcccccaaatgggcttgcccccccctcccccagccctgcggccccgcctcgtgttccacacccagctggcccatggcagtcccactggccgcatcgagggcttcaccaacgtcaaggagctgtatggcaagatcgccgaggccttccgcctgccaactgccgaggtgatgttctgcaccctgaacacccacaaagtggacatggacaagctcctggggggccagatcgggctggaggacttcatcttcgcccacgtgaaggggcagcgcaaggaggtggaggtgttcaagtcggaggatgcactcgggctcaccatcacggacaacggggctggctacgccttcatcaagcgcatcaaggagggcagcgtgatcgaccacatccacctcatcagcgtgggcgacatgatcgaggccattaacgggcagagcctgctgggctgccggcactacgaggtggcccggctgctcaaggagctgccccgaggccgtaccttcacgctgaagctcacggagcctcgcaaggccttcgacatgatcagccagcgttcagcgggtggccgccctggctctggcccacaactgggcactggccgagggaccctgcggctccgatcccggggccccgccacggtggaggatctgccctctgcctttgaagagaaggccattgagaaggtggatgacctgctggagagttacatgggtatcagggacacggagctggcggccaccatggtggagctgggaaaggacaaaaggaacccggatgagctggccgaggccctggacgaacggctgggtgactttgccttccctgacgagttcgtctttgacgtctggggcgccattggggacgccaaggtcggccgctactaggactgcccccggaccctgcgatgatgacccgggcgcaacctggtgggggcccccagcagggacactgacgtcaggacccgagcctccagcctgagcctagctcagcagcccaaggacgatggtgaggggaggtggggccaggccccctgccccgctccaatcggtaccatcccctccctggttcccagtctggccggggtccccggcccccctgtgccctgttccccacctacctcagctgggtcaggcacagggaggggagggatcagccaaattgggcggccacccccgcctccaccactttccaccatcagctgccaaactggtccctctgtctccctggggccttgggttctgtttgggggtcatgaccttcctagtttcctgacgcagggaatacaggggagagggttgtccttccccccagcaaatgcaataatgccctcacccctcctgagaggagccccctccctgtggagcctgttacctccgcatttgacacgagtctgctgtgaaccccgcaacctcctccccacctcccatctctccttccaggcccatccctggcccagagcaggagggagggagggacgatggcggtgggtttttgtatctgaatttgctgtcttgaacataaagaatctatctgctgttaaaaaaaaaaaaaaaaaaaaa

SEQ ID NO: 18 - DNA, 2318 bp, Homo sapiens
gccacgaaggccacagacgccttcccccttggactctcattcccttttccacggagccccgcgctttcgtgagccccctcgaggaacctggtctccgcatccagttaccacctcctgcctcagaggccatctgagcccttcgcacctcgcccctcagtccccccttgcccccccgcggagatcgcctcgctccctcccgcccccccatcatcccttccctcgcagttcccctgtcctgaggggagccccgccacggcagcgacagcgggcaggagggagaaagtgaaggttgggcgacacttggcctcactcccggctaggcgcacccacggggaggagaggaggagccgagagagctgagcagcgcggaagtagctgctgctggtggtgacaatgtcaaataacggcctagacattcaagacaaacccccagcccctccgatgagaaataccagcactatgattggagtcggcagcaaagatgctggaaccctaaaccatggttctaaacctctgcctccaaacccagaggagaagaaaaagaaggaccgattttaccgatccattttacctggagataaaacaaataaaaagaaagagaaagagcggccagagatttctctcccttcagattttgaacacacaattcatgtcggttttgatgctgtcacaggggagtttacgggaatgccagagcagtgggcccgcttgcttcagacatcaaatatcactaagtcggagcagaagaaaaacccgcaggctgttctggatgtgttggagttttacaactcgaagaagacatccaacagccagaaatacatgagctttacagataagtcagctgaggattacaattcttctaatgccttgaatgtgaaggctgtgtctgagactcctgcagtgccaccagtttcagaagatgaggatgatgatgatgatgatgctaccccaccaccagtgattgctccacgcccagagcacacaaaatctgtatacacacggtctgtgattgaaccacttcctgtcactccaactcgggacgtggctacatctcccatttcacctactgaaaataacaccactccaccagatgctttgacccggaatactgagaagcagaagaagaagcctaaaatgtctgatgaggagatcttggagaaattacgaagcatagtgagtgtgggcgatcctaagaagaaatatacacggtttgagaagattggacaaggtgcttcaggcaccgtgtacacagcaatggatgtggccacaggacaggaggtggccattaagcagatgaatcttcagcagcagcccaagaaagagctgattattaatgagatcctggtcatgagggaaaacaagaacccaaacattgtgaattacttggacagttacctcgtgggagatgagctgtgggttgttatggaatacttggctggaggctccttgacagatgtggtgacagaaacttgcatggatgaaggccaaattgcagctgtgtgccgtgagtgtctgcaggctctggagttcttgcattcgaaccaggtcattcacagagacatcaagagtgacaatattctgttgggaatggatggctctgtcaagctaactgactttggattctgtgcacagataaccccagagcagagcaaacggagcaccatggtaggaaccccatactggatggcaccagaggttgtgacacgaaaggcctatgggcccaaggttgacatctggtccctgggcatcatggccatcgaaatgattgaaggggagcctccatacctcaatgaaaaccctctgagagccttgtacctcattgccaccaatgggaccccagaacttcagaacccagagaagctgtcagctatcttccgggactttctgaaccgctgtctcgatatggatgtggagaagagaggttcagctaaagagctgctacagcatcaattcctgaagattgccaagcccctctccagcctcactccactgattgctgcagctaaggaggcaacaaagaacaatcactaaaaccacactcaccccagcctcattgtgccaagctctgtgagataaatgcacatttcagaaattccaactcctgatgccctcttctccttgccttgcttctcccatttcctgatctagcactcctcaagactttgatccttggaaaccgtgtgtccagcattgaagagaactgcaactgaatgactaatcagatgatggccatttctaaataaggaatttcctcccaattcatggatatgagggtggtttatgattaagggtttatataaataaatgtttctagtctt

SEQ ID NO: 19 - DNA, 571 bp, Homo sapiens
tcagccggacaccagaagacaagcagagagactcctccagacccactcagaccacgtgcacgccctccaagatggtatcccgtaaggctgtggctgctctgctggtggtgcatgtagctgccatgctggcctcccagacggaagccttcgtccccatcttcacctatggcgaactccagaggatgcaggaaaaggaacggaataaagggcaaaagaaatccctgagtgtatggcagaggtctggggaggaaggtcctgtagaccctgcggagcccatcagggaagaagaaaacgaaatgatcaagctgactgctcctctggaaattggaatgaggatgaactccagacagctggaaaagtacccggccaccctggaagggctgctgagtgagatgcttccccagcatgcagccaagtgatggccacgctggggagaaggtggacagatttgggaggcccctcctgcccaagtgaggccctgggaatttacagagcctgccagctgggcttggaaggaaaacacctttccaaagcaaattcccctccagcaaataaagcatgaaatatacag

SEQ ID NO: 20 - DNA, 3139 bp, Homo sapiens
ggccgaggaggaagtggcggcggcggcggcgggactgcgcgccccagctccgatccccgttccgcgtccccgccgccgggaggaggtgcccactcgctcgcggcgcgcgccggccgccagactcggcctgtgggcgatttcctccggacccaggctccccgcccgaggaggaagatgcagacctttctgaaagggaagagagttggctactggctgagcgagaagaaaatcaagaagctgaatttccaggccttcgccgagctgtgcaggaagcgagggatggaggttgtgcagctgaaccttagccggccgatcgaggagcagggccccctggacgtcatcatccacaagctgactgacgtcatccttgaagccgaccagaatgatagccagtccctggagctggtgcacaggttccaggagtacatcgatgcccaccctgagaccatcgtcctggacccgctccctgccatcagaaccctgcttgaccgctccaagtcctatgagctcatccggaagattgaggcctacatggaagacgacaggatctgctcgccacccttcatggagctcacgagcctgtgcggggatgacaccatgcggctgctggagaagaacggcttgactttcccattcatttgcaaaaccagagtggctcatggcaccaactctcacgagatggctatcgtgttcaaccaggagggcctgaacgccatccagccaccctgcgtggtccagaatttcatcaaccacaacgccgtcctgtacaaggtgttcgtggttggcgagtcctacaccgtggtccagaggccctcactcaagaacttctccgcaggcacatcagaccgtgagtccatcttcttcaacagccacaacgtgtcaaagccggagtcgtcatcggtcctgacggagctggacaagatcgagggcgtgttcgagcggccgagcgacgaggtcatccgggagctctcccgggccctgcggcaggcactgggcgtgtcactcttcggcatcgacatcatcatcaacaaccagacagggcagcacgccgtcattgacatcaatgccttcccaggctacgagggcgtgagcgagttcttcacagacctcctgaaccacatcgccactgtcctgcagggccagagcacagccatggcagccacaggggacgtggccctgctgaggcacagcaagcttctggccgagccggcgggcggcctggtgggcgagcggacatgcagcgccagccccggctgctgcggcagcatgatgggccaggacgcgccctggaaggctgaggccgacgcgggcggcaccgccaagctgccgcaccagagactcggctgcaacgccggcgtgtcgcccagcttccagcagcattgtgtggcctccctggccaccaaggcctcctcccagtagccacggagccgggacccagaggggcagcgcagggcgcagagcacacccgctgggccagcagctcccaacggcgatgctactactaagaatccccagtgatctgattcttctgttttttaatttttaacctgattctctgatgtcatgatctaaatgaggggtagtgggggatggaagagagtaccaggtggtccaccgttggggagtggggccgtccgcctgctctctactgtgcagacctcctaactgagtttacacacgcttgtgtttgcaacactaggtctggatgggaggtgaggggtgtgcgtatggctgccatgccggtgtctgtgcacatccctgtctgttggtctccatggccactgtggaccgggacccttgggggaagcctgcccatgtcgggctgtgggaggctgatcggtgcatgtgagagtggcttcccttctgcctgactccccactccctgacctgccccttccttgtttttcctcctactggtctccaccaaggctttgttagcccccaccctgcctggtgtgcagctaacccctccctccccacagccagaggaggccacagacccctcaggggagttccgcgctggtgtctgggctgtgctccctcactaaagggaaggaaaggaagctgggcgtcctctgggccccccaacacacgtcccatttagccctgcacagcggtctccttcccctaagccagcactgctgctccctggagcccgggaaggaggctgcctggctggaggcccgagccgatggcgcctgtgctgaggatttgtgctgtgatttgggcaaatcattccaggtctttgggcctccacccccttgtctctagtggacatttgagatcagagagcaccacagggctggctttgtgccctaacccctgggatgcagcctgcctttccataaagtcacctaggtgaggataggcgcgggagcctcggcatgacaccatggagatcggggccctcttcccagtgggttcactccttttcacacctgctgggtccctcctcacccagcaggcctggtccacctctcattgcaagccccaagcactgagccagcaggtgccagggagccacccgccccccatcgcttctgcacacctcagactcaccccatcaccttggcagcaaagcactggctctgccgtctgacccctgatccaggcagccccctctgcagagaaaagggttggggagaagcctctgcagtcctggaagatgtggggtgctgggtgagaggcatcagcccccacaagtatgtttttgtgtcttaagatagcagtttactttgaaaaagtgaaaaaggcttccgggctgtcctctgcccagtgagatggaggacgctagagaaagtgctgagtgtcccgagagaggcccccgagccagtgcatggaggtccttcggcctggctcagctgggctgcaggatgcccactttgaggagggaggcacagggcttgggcgaggggcagaggccatcagaactgcccggcttttttggaaactgaggacccaacaactaaccacgtttacacgacttgagttttgaaccccgattaatgtctgtacgtcacctttcctagttctgaccctgagccctggggaacaggaaagcgtggctggcctcttgcactgctttgtctccaaaataaactactgaaatcaaaccgcaaaaaaaaaaaaaaaaaaaaaa

SEQ ID NO: 21 - DNA, 3590 bp, Homo sapiens
aaaatcagaagagtggacactggcaagaggagggcagcctttttcccagcttccttgcaccatggacagctcccattaagccacctctccatcctggggccaggactcttatgccccattcctgtcaaattgagatttcatccaccattctccaaggacagtgaagttataccctagttccagtgttgggatcagtggcccctctggacatgcctctcctggaaggttctgtgggggtggaggatcttgtcctcctggaacccttggtggaggagtcactgctcaagaatcttcagcttcgctatgaaaacaaggagatttatacctacattgggaatgtggtgatctcagtgaatccctatcaacagcttcccatctatgggccagagttcattgccaaatatcaagactatactttctatgagctgaagccccatatctacgcattggcaaatgtggcgtaccagtcactgagggacagggaccgagaccagtgtatcctcatcacaggcgagagtggatcagggaagactgaggccagcaagctggtgatgtcttatgtggctgccgtctgtgggaaaggagagcaggtgaactctgtgaaggagcagctgctacagtctaacccagtgctggaggcttttggcaatgccaagaccattcgcaacaacaattcctcccgatttggaaaatacatggatattgaatttgacttcaagggatcccccctcggtggtgtcatcacaaactatctgcttgagaaatcccgattagtgaagcagctcaaaggagaaaggaacttccacatcttctatcagctgctggctggagcagatgaacagctgctgaaggccctgaagcttgagcgggatacaactggctatgcctatctgaatcatgaagtatccagagtggatggcatggacgacgcctccagcttcagggctgtacagagtgcaatggcagtgattgggttctcggaggaggagattcgacaagtgctagaggtgacatccatggtgctaaagctggggaacgtgttggtggctgatgagttccaggccagtgggataccagcaagtggcatccgtgatgggagaggtgttcgggagattggggagatggtgggcttgaattcagaagaagtagagagagctttgtgctcgaggaccatggaaacagccaaggaaaaggtggtcactgcactgaatgttatgcaggctcagtatgctcgggacgccctggctaagaacatctacagccgcctctttgactggatagtgaatcgaatcaatgagagcatcaaggtgggcatcggggaaaagaagaaggtaatgggagtccttgatatctacggttttgagatattagaggataatagctttgagcaatttgtgatcaactactgcaatgagaagctgcagcaggtgttcatagagatgaccctgaaagaagagcaagaggaatataagagagaaggcataccgtggacaaaggtggactactttgataatggcatcatttgtaagctcattgagcataatcagcgaggtatcctggccatgttggatgaggagtgcctgcggcctggggtggtcagtgactccactttcctagcaaagctgaaccagctcttctccaagcatggccactacgagagcaaagtcacccagaatgcccagcgtcagtatgaccacaccatgggcctcagctgcttccgcatctgccactatgcgggcaaggtgacatacaacgtgaccagctttattgacaagaataatgacctactcttccgagacctgttgcaggccatgtggaaggcccagcaccccctccttcggtccttgtttcctgagggcaatcctaagcaggcatctctcaaacgccccccgactgctggggcccagttcaagagttctgtggccatcctcatgaagaatctgtattccaagagccccaactacatcaggtgcataaagcccaatgagcatcagcagcgaggtcagttctcttcagacctggtggcaacccaggctcggtacctgggactgctggagaacgtacgggtgcgacgggcaggctatgcccaccgccagggttatgggcccttcctggaaaggtaccgattgctgagccggagcacctggcctcactggaatgggggagaccgggaaggtgttgagaaggtcctgggggagctgagcatgtcctcgggggagctggcctttggcaagacaaagatcttcattagaagccccaagactcttttctacctcgaagaacagaggcgcctgagactccagcagctggccacactcatacagaagatttaccgaggctggcgctgccgcacccactaccaactgatgcgaaagagtcagatcctcatctcctcttggtttcggggaaacatgcaaaagaaatgctatgggaagataaaggcatccgtgttattgatccaggcttttgtgagagggtggaaggcccgaaagaattatcgcaaatatttccggtcagaggctgccctcaccttggcagatttcatctacaagagcatggtacagaaattcctactggggctgaagaacaatttgccatccacaaacgtcttagacaagacatggccagccgccccctacaagtgcctcagcacagcaaatcaggagctgcagcagctcttctaccagtggaagtgcaagaggttccgggatcagctgtccccgaagcaggtagagatcctgagggaaaagctctgtgccagtgaactgttcaagggcaagaaggcttcatatccccagagtgtccccattccattctgtggtgactacattgggctgcaagggaaccccaagctgcagaagctgaaaggcggggaggaggggcctgttctgatggcagaggccgtgaagaaggtcaatcgtggcaatggcaagacttcttctcggattctcctcctgaccaagggccatgtgattctcacagacaccaagaagtcccaggccaaaattgtcattgggctagacaatgtggctggggtgtcagtcaccagcctcaaggatgggctctttagcttgcatctgagtgagatgtcatcggtgggctccaagggggacttcctgctggtcagcgagcatgtgattgaactgctgaccaaaatgtaccgggctgtgctggatgccacgcagaggcagcttacagtcaccgtgactgagaagttctcagtgaggttcaaggagaacagtgtggctgtcaaggtcgtccagggccctgcaggtggtgacaacagcaagctacgctacaaaaaaaaggggagtcattgcttggaggtgactgtgcagtgaggagggggcaccatgcagagatggcagttgcttcctcctgaaccagcactaatccccctctgccctcctgtgtgggaggatctctaacccctctgatcgtggcgcatggcttggggattaaactacccttgaagaggacccttgtcccaaacccttcttgttctctcctccaaaagtagcttcctccaacccgcagcctctctgcacactaataaaacatgtggcttggaaaggtccaaaaaaaaaaaa

SEQ ID NO: 22 - DNA, 3008 bp, Homo sapiens
taagaatgtcttttccacctcatttgaatcgccctcccatgggaatcccagcactcccaccagggatcccacccccgcagtttccaggatttcctccacctgtacctccagggaccccaatgattcctgtaccaatgagcattatggctcctgctccaactgtcttagtacccactgtgtctatggttggaaagcatttgggcgcaagaaaggatcatccaggcttaaaggctaaagaaaatgatgaaaattgtggtcctactaccactgtttttgttggcaacatttccgagaaagcttcagacatgcttataagacaactcttagctccttcggattctgtgagtacaaggagccagaatctaccctccgtgcactcagattattacatgacctgcaaattggagagaaaaagctactcgttaaagttgatgcaaagacaaaggcacagctggatgaatggaaagcaaagaagaaagcttctaatggggttgggatgaaagtagtaagggaggctggacaaggttaacttgccagagaaagcactggtacagactattccaaacagagctaattcattaaggcagctttgtaaaatgcaaggccagaaactgtcactaatgacgatgaagaagccttggatgaagaaacaaagaggagagatcagatgattaaaggggctattgaagttttaattcgtgaatactccagtgagctaaatgccccctcacaggaatctgattctcaccccaggaagaagaagaaggaaaagaaggaggacattttccgcagatttccagtggccccactgatcccttatccactcatcactaaggaggatataaatgctatagaaatggaagaagacaaaagagacctgatatctcgagagatcagcaaattcagagacacacataagaaactggaagaagagaaaggcaaaaaggaaaaagaaagacaggaaattgagaaagaacggagagaaagagagagggagcgtgaaagggaacgagaaaggcgagaacgggaacgagaaagggaaagagaacgtgaacgagaaaaggagaaagaacgggagcgggaacgagaacgggatagggaccgtgaccggacaaaagagagagaccgagatcgggatcgagagagagatcgtgaccgggatagagaaaggagctcagatcgtaataaggatcgcagtcgatcaagagaaaaaagcagagatcgtgaaagggaacgagagcgggaaagagagagagagagagaacgagagcgagaacgagaacgggagcgagagagagagcgagagagggaacgggagcgagaaagagaaaaagacaaaaaacgggaccgagaagaagatgaagaagatgcatacgaacgaagaaaacttgaaagaaaactccgagagaaagaagctgcttatcaagagcgccttaagaattgggaaatcagagaacgaaagaaaacccgggaatatgagaaagaagctgaaagagaagaagaaagaagaagagaaatggccaaagaagctaaacgactaaaagaattcttagaagactatgatgatgatagagatgaccccaaatattacagaggaagtgctcttcagaaaaggttgcgtgatagagaaaaggaaatggaagcagatgaacgagataggaagagagagaaggaggagcttgaggaaatcaggcagcgccttctggcagaagggcatccagatccagatgcagagctccagaggatggaacaagaggctgagaggcgcaggcagccacaaataaagcaagagccagaatcagaagaggaggaagaagaaaagcaagaaaaagaagaaaaacgagaagaacccatggaagaggaagaggagccagagcaaaagccttgtctgaaacctactctgaggcccatcagctctgctccatctgtttcctctgccagtggcaatgcaacacctaacactcctggggatgagtctccctgtggtattattattcctcatgaaaactcaccagatcaacagcaacctgaggagcataggccaaaaataggactaagtcttaaactgggtgcttccaatagtcctggtcagcctaattctgtgaagagaaagaaactacctgtagatagtgtctttaacaaatttgaggatgaagacagtgatgacgtaccccgaaaaaggaaactggttcccttggattatggtgaagatgataaaaatgcaaccaaaggcactgtaaacactgaagaaaagcgtaaacacattaagagtctcattgagaaaatccctacagccaaacctgagctcttcgcttatcccctggattggtctattgtggattctatactgatggaacgtcgaattagaccatggattaataagaaaatcatagaatatataggtgaagaagaagctacattagttgattttgtttgttctaaggttatggctcatagttcaccccagagcattttagatgatgttgccatggtacttgatgaagaagcagaagtttttatagtcaaaatgtggagattattgatatatgaaacagaagccaagaaaattggtcttgtgaagtaaaactttttatatttagagttccatttcagatttcttctttgccacccttttaaggactttgaatttttctttgtctttgaagacattgtgagatctgtaattttttttttttgtagaaaatgtgaattttttggtcctctaatttgttgttgccctgtgtactcccttggttgtaaagtcatctgaatccttggttctctttatactcaccaggtacaaattactggtatgttttataagccgcagctactgtacacagcctatctgatataatcttgttctgctgatttgtttcttgtaaatattaaaacgactccccaattattttgcagaattgcacttaatattgaaatgtactgtataggaaccaacatgaacaattttaattgaaaacaccagtcataaactattaccacccccactc

SEQ ID NO: 23 - DNA, 4540 bp, Homo sapiens
attctggggttcgtttagaggtttgaattttctcggagaaagacaggccggccacgaggaaaacagaaacaagccgcagcaacatctaagcccttgaaaggatcctgagagaggggggaaagggaaaacagcagccaccagcccaaccacttgtgtcttctgccccttcccacctatcttgcccaccccaccagcccacgctgcttgggacttgaaatctgtggccgaaggaccgtcactacataacttcaaaaataatcaaccaccctcccttcccaaaccacccaaattcactcatccagcgtttacttttttgaatccactcagaacttttttctgcgacccccctccctaaatggagttgggtgggggggaaatgaatactgagttggcctttattttttaaaagactttttgatccaatgaggccccctaaataattgagttttgggtcctggttggttgttttattttttttcctccaaaattttaccccctcccccctgagcccgaggtgctgacgtcgcaaaaaaattggataaaaccaccatcatgggttcgggtcccatagaccccaaagaacttctcaagggcctggacagcttccttaaccgagatggggaagtcaaaagtgtggatgggatttccaagatcttcagtttgatgaaggaagcacgaaagatggtgagtcgatgcacttacttgaacattctcctgcagacccgttcaccagaaatattggtcaaatttattgacgttggcggctacaaacttcttaacaattggctgacgtattcaaagacaaccaacaacattcccctcctccagcaaattctactgaccctgcagcatctaccgctcactgtagaccatctcaagcagaacaacacagctaaactggtgaagcagctgagcaagtcaagtgaggatgaagagctccggaaattggcctcagtccttgtcagcgactggatggctgtcatccgctctcagagcagtacccagcctgctgagaaagataagaagaaacgtaaagatgaaggaaaaagtcgaactacccttcctgagcgacctttgacagaggtgaaggctgagacccgggctgaggaggccccagagaagaagagggagaagcccaagtctcttcgcaccacagcacccagtcatgccaagttccgttccactggactagagctggagacaccatccttggtgcctgtgaagaagaatgccagcacagtggtggtttctgacaagtacaaccttaaacccatccccctcaaacgtcagagcaacgtagctgctccaggagatgccactccccctgcagagaagaaatacaagccactcaacacaacacctaatgccaccaaagagatcaaagtgaagatcatcccgccacagcctatggagggcctgggctttctggatgctcttaattcagcccctgttccaggcatcaaaattaagaagaaaaaaaaagtactgtcacctacggctgccaagccaagcccctttgaagggaaaacgagcacagaaccaagcacagccaaaccttcttccccagaaccagcaccaccttctgaggcaatggacgcagaccgtccaggcaccccggttccccctgttgaagtcccggagctcatggatacagcctctttggagccaggagctctggatgccaagccagtggagagtcctggagatcctaaccaactgacccggaaaggcaggaagaggaaaagtgtgacatggcctgaggaaggcaaactgagagaatatttctattttgaattggatgaaactgaacgagtaaatgtgaataagatcaaggactttggtgaggcggctaagcgagagatactgtcagaccgacatgcatttgagacagcgcggcgtctgagccatgataacatggaggagaaggtgccctgggtgtgcccccggcccctggttctgccctcacctcttgtcacccctggaagcaatagtcaggagcgatatatccaggctgagcgggagaagggaatccttcaggagctcttcctgaacaaggagagtcctcatgagcctgatcctgagccctacgagcccataccccctaaactcatccccctagatgaggagtgttccatggatgagactccgtatgttgagactctggaacctggggggtcaggtggctcacctgatggggcaggaggctccaagttgcctccagttctggccaatcttatgggaagcatgggtgctggaaagggcccccaaggccctggaggaggaggcattaatgtccaagagatcctcacctccatcatgggtagcccaaacagtcatccttcagaggaactactgaaacaaccagactattcggacaagatcaagcagatgctggtgccacatggactcctaggccctggcccaatagccaatggtttcccaccagggggtcctgggggccccaagggcatgcagcactttccccctggacctgggggacctatgccaggtccccatggaggccctggtgggccagtgggtccacgtcttctgggtcctccaccccctccccggggaggtgatcccttctgggatggcccgggcgaccctatgcggggtggcccaatgcgggggggtccaggaccaggtcctggaccataccatagaggccgaggtggccgaggaggaaacgaacctcctcctcctcctcctccattccgaggcgccagaggaggtcgctctggaggaggacccccaaatggacgagggggccctggtgggggcatggttggaggtggtgggcatcgtcctcacgaaggccctggtgggggcatgggcaacagcagtggacatcgtccccacgaaggccctggcggtggcatgggaagtgggcatcgcccccatgaaggccctggtggtagcatgggtgggggtggaggacatcgtccccacgaaggccctggcggtggcatcagtggtggcagtggccatcgtccccatgaaggccctggcggaggaatgggtgccggtggtggacatcgcccccacgaaggccctggcggaagcatgggtggaagtggtggacatcgtccccatgaaggccctggacacggggggccccatggccaccggcctcatgatgtccctggtcaccgaggccatgaccatcgagggccgccacctcatgagcaccgtggccatgatggtcctggccacgggggagggggccaccgagggcacgatggaggccacagccatggaggagacatgtcaaaccgccctgtctgccgacatttcatgatgaagggcaactgccgctatgagaacaactgtgccttctaccacccgggtgtcaatgggccccccctgccctagggaccatttgcctgccctgttcacacaacccctgtggactgcagcctcgctctttccaccctgttatggcttctgtgaggcccattttcccttttccccagctgatgaggagccggccccctcagttcccacttgcttgggttcctgggggttttctgatcactggtgcgcattgatgtacatattttcctccagtctggggaggagagagactggaaacgttcctggactgctgaagaggagacccagttggcttcactttttgagaagattcgccctgtaccccaaacccctttccagtattacccttaatgcttgagaacctaaagctggttatcctggcgaacacccctacccttctattgcgggtccccacatgcacacagaactctgacacaggatcagctgcacttaagaaatcatcccagctaagttcattattcctcatggggtggggagatgctgaaaggggtattgtatatcccactgcactgagagggctcaatcagctggatttgagttctggaacacacatcatccccacccctcccccagcgtgggctcaccattcttagtcctttctcaagtgggaccttcaactttctgtgaacacccagtctgcgtcctgggtctgctaggttcgatgatggcgaactcgtatctgcatccggtgcaagttttagctggcagaggtgagaccggtggtgctggtctgcctttgccaactatagccagtctggagacttgataaaatacttcagtgagaccagcttctcatcaacttgggcccggcgtgctgggcctgaaagtcacactacatgcactgcctttgggagtcagctcactccctgctcccacctggaaccttgccagcgtgaaggaggcttccaggtacttcaccctgtcaaccacctctgaatccccaccaggcgccttcctgggtggattcaacaagatgattttgccctttcccagttctctccttcactttggcatcagttgttttctatgaaaacagtggattggttgggttttgtgcagggtcttgggttagagccaaaatggatttgaggatgagtatttttttttttggttttgtatattttgtacattaataataaacagtggaaagagaagcagcttaaaaaaaaaaaaaaaaaaaaaa

SEQ ID NO: 24 - DNA, 3233 bp, Homo sapiens
tgcgactgagtcggtggcgaagacgggaacgcgacgatggcggagactctgcccgggtcgggcgactcgggccctggcacggcttctctcggcccgggcgttgcggagactgggacgaggcggctcagcgagctgcgggtgatcgatctgcgggcggagctgaagaagcggaacctggacacgggcggcaacaagagcgtcctgatggagcggctcaagaaggcggttaaagaagaggggcaagatcctgatgaaattggcatcgagttagaagccaccagcaagaagtcagccaagagatgtgttaaaggactgaagatggaggaggaaggcacagaagataatggcctggaagacgattccagagacgggcaggaggacatggaagcaagtctggagaacctgcagaatatgggcatgatggacatgagtgtgctagacgaaactgaagtggcgaatagcagtgctccagattttggggaggatggcacggacggccttctcgattccttttgtgatagtaaagaatacgtggctgcacagctgagacagctcccggctcagcccccagagcatgctgtggatggggaaggatttaagaacactttggaaacttcatcgttgaacttcaaagtaactccggacattgaagaatcccttttggagccagaaaatgagaaaatactcgacattttgggggaaacttgtaaatctgagccagtaaaagaagaaagttccgagctggagcagccatttgcacaggacacaagtagcgtggggccagacagaaagcttgcggaggaagaggacctatttgacagcgcccatccggaagagggtgatttagatttggccagcgagtcaacagcacacgctcagtcgagcaaggcagacagcctgttagcggtagtgaaaagggagcccgcggagcagccaggcgatggcgagaggacggactgtgagcctgtagggctagagccggcagttgagcagagtagtgcggcctccgagctcgcggaggcctctagcgaggagctcgcagaagcacccacggaagccccaagcccagaagccagagatagcaaagaagacgggaggaagtttgattttgacgcttgtaatgaagtccctccggctcctaaagagtcctcaaccagtgagggcgctgatcagaaaatgagctcttttaaggaagaaaaagatataaagccaatcattaaagatgaaaaaggtcgggtcggcagcggttctggtcggaacctgtgggtcagcgggctgtcctccacaacacgcgctacggatctcaagaaccttttcagcaagtatgggaaggttgtcggggccaaagtggtaacgaacgcccgcagcccgggggctcgatgctatggattcgtcaccatgtcgacatctgacgaggcgaccaagtgcatcagccatctccacagaactgagctgcatggacgaatgatctccgtagagaaggccaaaaatgagcctgctgggaaaaagctttccgacagaaaagagtgcgaagtgaagaaggaaaaattatcgagtgtcgacagacatcattctgtggagatcaaaattgaaaaaactgtaattaagaaggaagagaagattgagaagaaggaggaaaaaaagcctgaagacattaagaaggaagaaaaagaccaggatgagctgaaacccggacctacaaatcggtctagagtcaccaaatcaggaagcagaggaatggagcggacggtcgtgatggataaatcgaaaggagagcccgtcattagcgtgaaaaccacaagcaggtccaaagagagaagctccaagagtcaggatcgcaagtcagaaagcaaagaaaagagagacatcttgtcgtttgataaaatcaaagaacaaagggagagagagcgccagaggcagcgggaacgggagatccgcgaaacggagaggcggcgggagcgcgagcagcgggagcgggagcaacgcctcgaggccttccatgagcggaaggagaaggcccggctacagcgggaacgcctgcagctcgagtgccagcgccagcggctggagcgggagcgcatggagcgggagcggctggagcgcgagcgcatgcgcgtggagcgtgagcgcaggaaggagcaggagcgcatccaccgcgagcgcgaggagctgcggcgccagcaggagcagctgcgttacgagcaggagcggcggcccgggcggaggccctacgacctggaccgacgagatgatgcctattggccagaaggaaagcgtgtggcaatggaggaccgatatcgtgcagactttccccggccagaccaccgctttcacgacttcgatcatcgagaccggggccagtaccaggaccacgccatcgacaggcgggagggttcgaggccaatgatgggagaccaccgggatgggcagcactatggagatgaccgccatggccacggaggacccccagagcgccacggccgggactcccgtgatggctgggggggctacggctccgacaagaggctgagtgaaggccgggggctgccccctccccccaggggtggccgtgactggggagagcacaaccagcggctagaggagcaccaggcacgcgcctggcagggtgccatggacgcaggcgcggctagccgggagcacgccaggtggcaaggtggcgagaggggcctgtctgggccctcggggccggggcacatggcaagccgcggtggagtggcggggcgaggcggctttgcacaaggtggacattcccagggccacgtggtgccaggtggcggactggaaggtggcggagtggccagccaggaccggggcagcagagtccctcacccacaccctcatccccccccgtacccccacttcacccgccgctactaagtcccactcgctgtgagttttcgggtgggcagacgcactgttgaatctggtagccagggttccctcgaacttgggggatctttttaaaagcaaagtaaatcctgccaccatgttgtagctcaatacaatgtgaactcacttttttttttttttttaataaatgtgttcttgttctgccatttttaaatcaaggtttctgttaacgaggcattccattttccattaataaagtttaccattcgcaaaaaaaaaatgtgttcttgttctgccatttttaaatcaaggtttctgttaacgaggcattccattttccattaataaagtttaccattcgc

SEQ ID NO: 25 - DNA, 17847 bp, Homo sapiens
atgggtgccccgagcgcgtgccggacgctggtgttggctctggcggccatgctcgtggtgccgcaggcagagtgcacgggcagatccccctacgactccctgagtgtcctggatgggaccctacccgtccccaacacagggctctggggccccacgggctcacagtgtcaggaaactcaggggctggcttggatggggtgtccaggagaagagacccagggccctgtggagccgagctgggagaatgcagggcacaccatggatggcggtgccccgacgtcctcgcccacccggcgcgtgagctttgttccacccgtcactgtcttccccagcctgagccgtaagcagatgctgcccctgccagccgggaagggggtgtttgccagtcccaaaggtgggggcccagatctaggggtgcagctgccaccagccctgaacccggcgcacaatgggcgggtgtgcagcacctggggtgacttccactacaagaccttcgacggcgacgtcttccgcttccctggcctttgcaactacgtgttctctgagcactgccgcgccgcctacgaggacttcaacgtccagctacgccgaggcctagtgggctccaggcctgtggtcacccgtgttgtcatcaaggcccaggggctggtgctggaggcgtccaacggctccgtcctcatcaatgggcagcgggaggagctgccttacagccgcactggcctcctggtggagcagagcggggactacatcaaggtcagcatccggctggtgctgacattcctgtggaacggagaggacagtgccctgctggagctggatcccaaatacgccaaccagacctgtggcctgtgtggggacttcaacggcctcccggccttcaacgagttctatgcccacaacgccaggctgaccccgctccagtttgggaacctgcagaagttggatgggcccacggagcagtgcccggacccgctgcccttgccggccggcaactgcacggacgagcccccatggatggcaggggtgcccagcctggcccactgtgctccccaggagggcatctgccaccgcaccctgctggggccggcctttgcggagtgccacgcactggtggacagcactgcgtacctggccgcctgcgcccaggacctgtgccgctgccccacctgcccgtgtgccacctttgtggaatactcacgccagtgcgcccacgcggggggccagccgcggaactggaggtgccctgagctctgcccccggacctgccccctcaacatgcagcaccaggagtgtggctcaccctgcacggacacctgctccaacccccagcgcgcgcagctctgcgaggaccactgtgtggacggctgcttctgccccccaggcacggtgctggatgacatcacgcactctggctgcctgcccctcgggcagtgcccctgcacccacggcggccgcacctacagcccgggcacctccttcaacaccacctgcagctcctgcacctgctccggggggctatggcagtgccaggacctgccgtgccctggcacctgctctgtgcagggcggggcccacatctccacctatgatgagaaactctacgacctgcatggtgactgcagctacgttctgtccaagagccacatcccccacatgggcatccccagcacacttctggggggcaccccacatcatcgagccaggcccaatgcacgcgtgggtccttctccccagaaatgtgccgacagcagcttcaccgtgctggctgagctgcggaagtgcggcctgacggacaacgagaactgcctgaaagcggtgacgctcagcctggacggcggggacacggccatccgggtccaagcggacggcggcgtgttcctcaactccatctacacgcagctgcccctgtcggcagccaacatcaccctgttcacaccctcgagcttcttcatcgtggtgcagacaggcctggggctgcagctgctggtgcagctggtgccactcatgcaggtgtttgtcaggctggaccccgcccaccagggccagatgtgcggcctgtgtgggaacttcaaccagaaccaggctgacgacttcacggccctcagcggggtggtggaggccacgggcgcagccttcgccaacacctggaaggcccaggctgcctgtgccaatgccaggaacagctttgaggacccctgctccctcagtgtggagaatgagaactacgcccggcactggtgctcgcgcctgaccgatcccaacagtgccttctcgcgctgccactccatcatcaaccccaagcccttccactcgaactgcatgtttgacacctgcaactgtgagcggagcgaggactgcctgtgcgccgcgctgtcctcctatgtgcacgcctgtgccgccaagggcgtacagctcagcgactggagggacggcgtctgcaccaagtacatgcagaactgccccaagtcccagcgctacgcctacgtggtggatgcctgccagcccacttgccgcggcctgagtgaggccgacgtcacctgcagcgtttccttcgtgcctgtggacggctgcacctgccccgcgggcaccttcctcaatgacgcgggcgcctgtgtgcccgcccaggagtgcccctgctacgctcacggcaccgtgctggctcctggagaggtggtgcacgacgagggcgccgtgtggtaagggtctggggggaaagcaggccccccagggtgtgcagcccccatggtgtacctggactgcagcaacagctcggcgggcacccctggggccgagtgcctccggagctgccacacgctggacgtgggctgtttcagcacacactgcgtgtccggctgtgtctgtcccccggggctggtgtcggatgggagtgggggctgcattgccgaggaggactgcccctgtgtgcacaacgaggccacctacaagcctggagagaccatcagggtcgactgcaacacctgcacctgcaggaaccggaggtgggagtgcagccaccggctctgcctgggcacctgcgtggcctacggggatggccacttcatcacctttgatggcgatcgctacagctttgaaggcagctgcgagtacatcttggcccaggactactgtggggacaacaccacccacgggaccttccgcatcgtcaccgagaacatcccctgtgggaccaccggcaccacctgctccaaggccatcaagctcttcgtggaggtgagaacggccccagctgtgagcacccccgaccctgcagccaacgagccggcccccagggaagcttcggtcggcttccggcagcgtctgcctcccctgcagagctacgagctgatcctccaagaggggacctttaaggcggtggcgagagggccgggtggggacccaccctacaagatacgctacatggggatcttcctggtcatcgagacccacgggatggccgtgtcctgggaccggaagaccagcgtgttcatccgactgcaccaggactacaagggcagggtctgcggcctgtgcgggaacttcgacgacaatgccatcaatgactttgccacgcgtagccggtccgtggtgggggacgcactggagtttgggaacagctggaagctctccccctcctgcccggacgccctggcacccaaggacccctgcacggccaaccccttccgcaagtcctgggcccagaagcagtgcagcatcctccacggccccaccttcgccgcctgccgctcccaggttgactccaccaagtactacgaggcctgcgtgaacgacgcgtgtgcctgcgactcgggtggcgactgcgagtgtttctgcacggctgtggctgcctacgcccaggcctgccacgacgcgggcctgtgtgtgtcctggcggactccggacacctgccccttgttctgtgacttctacaacccacatgggggctgtgagtggcactaccagccctgcggggcaccctgcctaaaaacctgccggaaccccagtgggcactgcctggtggacctgcctggcctggaaggctgctacccgaagtgcccacccagccagcccttcttcaatgaggaccagatgaagtgcgtggcccagtgtggctgctacgacaaggacggaaactactatgacgtcggtgcaagggtccccacagcggagaactgccagagctgtaactgcacacccagtggcatccagtgcgctcacagccttgaggcctgcacctgcacctatgaggacaggacctacagctaccaggacgtcatctacaacaccaccgatgggcttggcgcctgcttgatcgccatctgcggaagcaacggcaccatcatcaggaaggctgtggcatgtcctggaactccagccacaacgccattcaccttcaccaccgcctgggtcccccactccacgacaagcccggccctcccggtctccaccgtgtgtgtccgcgaggtctgccgctggtccagctggtacaatgggcaccgcccagagcccggcctgggaggcggagactttgagacgtttgaaaacctgaggcagagagggtaccaggtatgccctgtgctggctgacatcgagtgccgggcggcgcagcttcccgacatgccgctggaggagctgggccagcaggtggactgtgaccgcatgcgggggctgatgtgcgccaacagccaacagagtcccccgctctgtcacgactacgagctgcgggttctctgctgcgaatacgtgccctgtggcccctccccggccccaggcaccagccctcagccctccctcagtgccagcacggagcctgctgtgcctaccccaacccagaccacagcaaccgaaaagaccaccctatgggtgaccccgagcatccggtcgacggcggccctcacctcgcagactgggtccagctcaggccccgtgacggtcaccccctcggccccaggtaccaccacctgccagccccggtgtcagtggacagagtggtttgatgaggactaccccaagtctgaacaacttggaggggacgttgagtcctacgataagatcagggccgctggagggcacttatgccagcagcctaaggacatagagtgccaggccgagagcttccccaactggaccctggcacaggtggggcagaaggtgcactgtgacgtccacttcggcctggtgtgcaggaactgggagcaggagggcgtcttcaagatgtgctacaactacaggatccgggtcctctgctgcagtgacgaccactgcaggggacgtgccacaaccccgccaccgaccacagagctggagacggccaccaccaccaccacccaggccctgttctcaacgccgcagcctacgagtagcccggggctgaccagggctcccccggccagcaccacagcagtccccaccctctcagaaggactgacatcccccagatacacaagcacccttggtacagccaccacgggaggccccacgacgcctgcaggctccacagaacccactgtcccaggggtggccacatccacccttccaacacgctcagcccttccagggacgacggggagcttgggcacatggcgcccctcacagccacccacgctggccccaacaacaatggcaacctccagagctcgcccgacaggcacagccagcaccgcttccaaagagccgctgaccacgagcctggcgccaacactcacgagcgagctgtccacctctcaggccgagaccagcacgcccaggacagagacgacaatgagccccttgactaacaccaccaccagccagggcacgacccgctgtcaaccgaagtgtgagtggacagagtggtttgacgtggacttcccaacctcaggggttgcaggcggggacatggaaacttttgaaaacatcagggctgctgggggcaagatgtgctgggcaccaaagagcatagagtgccgggcggagaactaccccgaggtaagcatcgaccaggtcgggcaggtgctgacctgcagcctggagacggggctgacctgcaagaacgaagaccagacaggcaggttcaacatgtgcttcaactacaacgtgcgtgtgctttgctgtgacgactacagccactgccccagtaccccagccaccagctccacggccacgccctcctcaactccggggacgacctggatcctcacaaagccgaccacaacagccactacgactgcgtccactggatccacggccaccccgacctccaccctgagaacagctccccctcccaaagtgctgaccaccacggccaccacacccacagtcaccagctccaaagccactccctcctccagtccagggactgcaaccgcccttccagcactgagaagcacagccaccacacccacagctaccagcgttacacccatcccctcttcctccctgggcaccacctggacccgcctatcacagaccaccacacccacggccaccatgtccacagccacaccctcctccactccagagactgcccacacctccacagtgcttaccgccacggccaccacaactggggccaccggctctgtggccaccccctcctccaccccaggaacagctcacactaccaaagtgccaactaccacaaccacgggcttcacagccaccccctcctccagcccagggacggcactcacgcctccagtgtggatcagcacaaccaccacacccacaaccagaggctccacggtgaccccctcctccatcccggggaccacccacaccgccacagtgctgaccaccaccaccacaactgtggccactggttctatggcaacaccctcctctagcacacagaccagtggtactcccccatcactgaccaccacggccactacgatcacggccaccggctccaccaccaacccctcctcaactcctgggacaactcccatccccccagtgctgaccaccaccgccaccacacctgcagccaccagcaacacagtgactccctcctctgccctagggaccacccacacacccccagtgccgaacaccatggccaccacacacgggcgatccctgccccccagcagtccccacacggtgcgcacagcctggacttcggccacctcgggcatcttgggcaccacccacatcacagagccttccacggtgacttcccacaccctagcagcaaccaccggtaccacccagcactcgactccagccctttccagccctcaccctagcagcagaaccaccgagtcacccccttctccagggacgaccaccccgggccacaccacggccacctccaggaccacagccacggccacacccagcaagacccgcacctcgaccctgctgcccagcagccccacatcggcccccataaccacggtggtgaccatgggctgtgagccccagtgtgcctggtcagagtggctggactacagctaccccatgccggggccctctggcggggactttgacacctactccaacatccgtgcggccggaggggccgtctgtgagcagcccctgggcctcgagtgccgtgcccaggcccagcctggtgtccccctgcgggagttgggccaggtcgtggaatgcagcctggactttggcctggtctgcaggaaccgtgagcaggtggggaagttcaagatgtgcttcaactatgaaatccgtgtgttctgctgcaactacggccactgccccagcaccccggccaccagctctacggccatgccctcctccactccggggacgacctggatcctcacagagctgaccacaacagccactacgactgagtccactggatccacggccaccccgtcctccaccccagggaccacctggatcctcacagagccgagcactacagccaccgtgacggtgcccaccggatccacggccaccgcctcctccacccaggcaactgctggcaccccacatgtgagcaccacggccacgacacccacagtcaccagctccaaagccactcccttctccagtccagggactgcaaccgcccttccagcactgagaagcacagccaccacacccacagctaccagctttacagccatcccctcctcctccctgggcaccacctggacccgcctatcacagaccaccacacccacggccaccatgtccacagccacaccctcctccactccagagactgtccacacctccacagtgcttaccaccacggccaccacaaccggggccaccggctctgtggccaccccctcctccaccccaggaacagctcacactaccaaagtgctgactaccacaaccacgggcttcacagccaccccctcctccagcccagggacggcacgcacgcttccagtgtggatcagcacaaccaccacacccacaaccagaggttccacggtgaccccctcctccatcccggggaccacccacacccccacagtgctgaccaccaccaccacaactgtggccactggttctatggcaacaccctcctctagcacacagaccagtggtactcccccatcactgaccaccacggccactacgatcacggccaccggctccaccaccaacccctcctcaactccagggacaacacctatccccccagtgctgaccaccaccgccaccacacctgcagccaccagcagcacagtgactccctcctctgccctagggaccacccacacacccccagtgccgaacaccacggccaccacacacgggcgatccctgtcccccagcagtccccacacggtgcgcacagcctggacttcggccacctcaggcaccttgggcaccacccacatcacagagccttccacggggacttcccacaccccagcagcaaccaccggtaccacccagcactcgactccagccctgtccagccctcaccctagcagcaggaccaccgagtcacccccttctccagggacgaccaccccgggccacaccagggccacctccaggaccacggccacggccacacccagcaagacccgcacctcgaccctgctgcccagcagccccacatcggccccaataaccacggtggtgaccatgggctgtgagccccagtgtgcctggtcagagtggctggactacagctaccccatgccggggccctctggcggggactttgacacctactccaacatccgtgcggccggaggggccgtctgtgagcagcccctgggcctcgagtgccgtgcccaggcccagcctggtgtccccctgcgggagttgggccaggtcgtggaatgcagcctggactttggcctggtctgcaggaaccgtgagcaggtggggaagttcaagatgtgcttcaactatgaaatccgtgtgttctgctgcaactacggccactgccccagcaccccggccaccagctctacggccacgccctcctccactccagggacgacctggatcctcacagagcagaccacagcagccactacgaccgcaaccactggatccacggccatcccgtcctccaccccgggaacagctccccctcccaaagtgctgaccagcacggccaccacacccacagccaccagttccaaagccacttcctcctccagtccaaggactgcaaccacccttccagtgctgacaagcacagccaccaaatccacagctaccagctttacacccatcccctccttcacccttgggaccaccgggaccctcccagaacagaccaccacacccatggccaccatgtccacaatccacccctcctccactccggagaccacccacacctccacagtgctgaccacgaaggccaccacgacaagggccaccagttccatgtccaccccctcctccactccggggacgacctggatcctcacagagctgaccacagcagccactacaactgcagccactggccccacggccaccccgtcctccaccccagggaccacctggatcctcacagagcccagcactacagccaccgtgacggtgcccaccggatccacggccaccgcctcctccacccgggcaactgctggcaccctcaaagtgctgaccagcacggccaccacacccacagtcatcagctccagagccactccctcctccagtccagggactgcaaccgcccttccagcactgagaagcacagccaccacacccacagctaccagcgttacagccatcccctcttcctccctgggcaccgcctggacccgcctatcacagaccaccacacccacggccaccatgtccacagccacaccctcctctactccagagactgtccacacctccacagtgcttaccaccacgaccaccacaaccagggccaccggctctgtggccaccccctcctccaccccaggaacagctcacactaccaaagtgccgactaccacaaccacgggcttcacagccaccccctcctccagcccagggacggcactcacgcctccagtgtggatcagcacaaccaccacacccacaaccagaggctccacggtgaccccctcctccatcccggggaccacccacaccgccacagtgctgaccaccaccaccacaactgtggccactggttctatggcaacaccctcctctagcacacagaccagtgggaccacccacacacccccagtgccgaacaccacggccaccacacacgggcggtccctgccccccagcagtccccacacggtgcgcacagcctggacttcggccacctcgggcatcttgggcaccacccacatcacagagccttccacggtgacttcccacaccccagcagcaaccaccagtaccacccagcactcgactccagccctgtccagccctcaccctagcagcaggaccaccgagtcacccccttctccagggacgaccaccccgggccacaccaggggcacctccaggaccacagccacagccacacccagcaagacccgcacctcgaccctgctgcccagcagccccacatcggcccccataaccacggtggtgaccacgggctgtgagccccagtgtgcctggtcagagtggctggactacagctaccccatgccggggccctctggcggggactttgacacctactccaacatccgtgcggccggaggggcagtctgtgagcagcccctgggcctcgagtgccgtgcccaggcccagcctggtgtccccctgcgggagttgggccaggtcgtggaatgcagcctggactttggcctggtctgcaggaaccgtgagcaggtggggaagttcaagatgtgcttcaactatgaaatccgtgtgttctgctgcaactacggccactgccccagcaccccggccaccagctctacggccacgccctcctcaactccggggacgacctggatcctcacaaagctgaccacaacagccactacgactgagtccactggatccacggccaccccgtcctccaccccagggaccacctggatcctcacagagccgagcactacagccaccgtgacggtgcccaccggatccacggccaccgcctcctccacccaggcaactgctggcaccccacatgtgagcaccacggccacgacacccacagtcaccagctccaaagccactcccttctccagtccagggactgcaaccgcccttccagcactgagaagcacagccaccacacccacagctaccagctttacagccatcccctcctcctccctgggcaccacctggacccgcctatcacagaccaccacacccacggccaccatgtccacagccacaccctcctccactccagagactgcccacacctccacagtgcttaccaccacggccaccacaaccagggccaccggctctgtggccaccccctcttccaccccaggaacagctcacactaccaaagtgccgactaccacaaccacgggcttcacagtcaccccctcctccagcccagggacggcacgcacgcctccagtgtggatcagcacaaccaccacacccacaaccagtggctccacggtgaccccctcctccgtcccggggaccacccacacccccacagtgctgaccaccaccaccacaactgtggccactggttctatggcaacaccctcctctagcacacagaccagtggtactcccccatcactgatcaccacggccactacgatcacggccaccggctccaccaccaacccctcctcaactccagggacaacacctatccccccagtgctgaccaccaccgccaccacacctgcagccaccagcagcacagtgactccctcctctgccctagggaccacccacacacccccagtgccgaacaccacggccaccacacacgggcgatccctgtcccccagcagtccccacacggtgcgcacagcctggacttcggccacctcaggcaccttgggcaccacccacatcacagagccttccacggggacttcccacaccccagcagcaaccaccggtaccacccagcactcgactccagccctgtccagccctcaccctagcagcaggaccaccgagtcacccccttccccagggacgaccaccccgggccacaccacggccacctccaggaccacggccacggccacacccagcaagacccgcacctcgaccctgctgcccagcagccccacatcggcccccataaccacggtggtgaccacgggctgtgagccccagtgtgcctggtcagagtggctggactacagctaccccatgccggggccctctggcggggactttgacacctactccaacatccgtgcggccggaggggccgtctgtgagcagcccctgggcctcgagtgccgtgcccaggcccagcctggtgtccccctgggggagttgggccaggtcgtggaatgcagcctggactttggcctggtctgcaggaaccgtgagcaggtggggaagttcaagatgtgcttcaactatgaaatccgtgtgttctgctgcaactacggccactgccccagcaccccggccaccagctctacggccatgccctcctccactccggggacgacctggatcctcacagagctgaccacaacagccactacgactgcatccactggatccacggccaccccgtcctccaccccgggaacagctccccctcccaaagtgctgaccagcccggccaccacacccacagccaccagttccaaagccacttcctcctccagtccaaggactgcaaccacccttccagtgctgacaagcacagccaccaaatccacagctaccagcgttacacccatcccctcctccacccttgggaccaccgggaccctcccagaacagaccaccacacccgtggccaccatgtccacaatccacccctcctccactccggagaccacccacacctccacagtgctgaccacgaaggccaccacgacaagggccaccagttccacgtccaccccctcctccactccggggacgacctggatcctcacagagctgaccacagcagccactacaactgcagccactggccccacggccaccccgtcctccaccccagggaccacctggatcctcacagagctgaccacaacagccactacgactgcgtccactggatccacggccaccccgtcctccaccccagggaccacctggatcctcacagagccgagcactacagccaccgtgacggtgcccaccggatccacggccaccgcctcctccacccaggcaactgctggcaccccacatgtgagcaccacggccacgacacccacagtcaccagctccaaagccactccctcctccagtccagggactgcaactgcccttccagcactgagaagcacagccaccacacccacagctaccagctttacagccatcccctcctcctccctgggcaccacctggacccgcctatcacagaccaccacacccacggccaccatgtccacagccacaccctcctccactccagagactgtccacacctccacagtgcttaccgccacggccaccacaaccggggccaccggctctgtggccaccccctcctccaccccaggaacagctcacactaccaaagtgccgactaccacaaccacgggcttcacagccaccccctcctccagcccagggacggcactcacgcctccagtgtggatcagcacaaccaccacacccacaaccaccacacccacaaccagtggctccacggtgaccccctcctccatcccggggaccacccacaccgccagagtgctgaccaccaccaccacaactgtggccactggttctatggcaacaccctcctctagcacacagaccagtggtactcccccatcactgaccaccacggccactacgatcacggccaccggctccaccaccaacccctcctcaactccagggacaacacccatcaccccagtgctgaccagcacggccaccacacccgcagccaccagctccaaagccacttcctcctccagtccaaggactgcaaccacccttccagtgctgacaagcacagccacaaaatccacagctaccagctttacacccatcccctcctccaccctgtggaccacgtggaccgtcccagcacagaccaccacacccatgtccaccatgtccacaatccacacctcctctactccagagaccacccacacctccacagtgctgaccaccacagccaccatgacaagggccaccaattccacggccacaccctcctccactctggggacgacccggatcctcactgagctgaccacaacagccactacaactgcagccactggatccacggccaccctgtcctccaccccagggaccacctggatcctcacagagccgagcactatagccaccgtgatggtgcccaccggttccacggccaccgcctcctccactctgggaacagctcacacccccaaagtggtgaccaccatggccactatgcccacagccactgcctccacggttcccagctcgtccaccgtggggaccacccgcacccctgcagtgctccccagcagcctgccaaccttcagcgtgtccactgtgtcctcctcagtcctcaccaccctgagacccactggcttccccagctcccacttctctactccctgcttctgcagggcatttggacagtttttctcgcccggggaagtcatctacaataagaccgaccgagccggctgccatttctacgcagtgtgcaatcagcactgtgacattgaccgcttccagggcgcctgtcccacctccccaccgccagtgtcctccgccccgctgtcctcgccctcccctgcccctggctgtgacaatgccatccctctccggcaggtgaatgagacctggaccctggagaactgcacggtggccaggtgcgtgggtgacaaccgtgtcgtcctgctggacccaaagcctgtggccaacgtcacctgcgtgaacaagcacctgcccatcaaagtgtcggacccgagccagccctgtgacttccactatgagtgcgagtgcatctgcagcatgtggggcggctcccactattccacctttgacggcacctcttacaccttccggggcaactgcacctatgtcctcatgagagagatccatgcacgctttgggaatctcagcctctacctggacaaccactactgcacggcctctgccactgccgctgccgcccgctgcccccgcgccctcagcatccactacaagtccatggatatcgtcctcactgtcaccatggtgcatgggaaggaggagggcctgatcctgtttgaccaaattccggtgagcagcggtttcagcaagaacggcgtgcttgtgtctgtgctggggaccaccaccatgcgtgtggacattcctgccctgggcgtgagcgtcaccttcaatggccaagtcttccaggcccggctgccctacagcctcttccacaacaacaccgagggccagtgcggcacctgcaccaacaaccagagggacgactgtctccagcgggacggaaccactgccgccagttgcaaggacatggccaagacgtggctggtccccgacagcagaaaggatggctgctgggccccgactggcacaccccccactgccagccccgcagccccggtgtctagcacacccacccccaccccatgcccaccacagccgctctgtgatctgatgctgagccaggtctttgctgagtgccacaaccttgtgcccccgggcccattcttcaacgcctgcatcagcgaccactgcaggggccgccttgaggtgccctgccagagcctggaggcttacgcagagctctgccgcgcccggggagtgtgcagtgactggcgaggtgcaaccggtggcctgtgcgacctcacctgcccacccaccaaagtgtacaagccatgcggccccatacagcctgccacctgcaactctaggaaccagagcccacagctggaggggatggcggagggctgcttctgccctgaggaccagatcctcttcaacgcacacatgggcatctgcgtgcaggcctgcccctgcgtgggacccgatgggtttcctaaatttcccggggagcggtgggtcagcaactgccagtcctgcgtgtgtgacgagggttcagtgtcggtgcagtgcaagcccctgccctgtgacgcccagggtcagcccccgccgtgcaaccgtcccggcttcgtaaccgtgaccaggccccgggccgagaacccctgctgccccgagacggtgtgcgtgtgcaacacaaccacctgcccccagagcctgcctgtgtgcccgccagggcaggagtccatctgcacccaggaggagggcgactgctgtcccaccttccgctgcagacctcagctgtgttcgtacaatggcaccttctacggggttggtgcaaccttcccaggcgcccttccctgccacatgtgtacctgcctctctggggacacccaggacccaacggtgcaatgtcaggaggatgcctgcaacaatactacctgtccccagggctttgagtacaagagagtggccgggcagtgctgtggggagtgcgtccagaccgcctgcctcacgcccgatggccagccagtccagctgaatgaaacctgggtcaacagccatgtggacaactgcaccgtgtacctctgtgaggctgagggtggagtccatttgctgaccccacagcctgcatcctgcccagatgtgtccagctgcagggggagcctcaggaaaaccggctgctgctactcctgtgaggaggactcctgtcaagtccgcatcaacacgaccatcctgtggcaccagggctgcgagaccgaggtcaacatcaccttctgcgagggctcctgccccggagcgtccaagtactcagcagaggcccaggccatgcagcaccagtgcacctgctgccaggagaggcgggtccacgaggagacggtgcccttgcactgtcctaacggctcagccatcctgcacacctacacccacgtggatgagtgtggctgcacgcccttctgtgtccctgcgcccatggctcccccacacacccgtggcttcccggcccaggaggccactgctgtctgagaacgttctgcctccatccccatgctctgtccacctggagccaggatgtgcattgtctgatcatgaaaaccttgggcctcctctgcggagccccccggcctgtgtgtggcaccccgcgctccgtgctcctgctgcccaccccgtgggtgaaaccggccccagaagggtgaggggccagcaggacccctttcgggagggcgccactcaggagtcctaccctgggagagcctgtggcccaccttggccttgcccctccctgatgtcactggg

SEQ ID NO: 26 - DNA, 3499 bp, Homo sapiens
gccaagaagcttgagagaagaaaaatttcagaaaaattgtctcaatttgactagaatatcaatgaaccaggaaaactgaagcaccttccctaaagaaaacttgggtatacaattactccacagacagagctgagggttttttacccaaatcagtcactggattttgctgcctgatacgtgaatcttcttggaatttttctcatgtggatctaaggggaatgctttattatggctgctgttgtccaacagaacgacctagtatttgaatttgctagtaacgtcatggaggatgaacgacagcttggtgatccagctatttttcctgccgtaattgtggaacatgttcctggtgctgatattctcaatagttatgccggtctagcctgtgtggaagagcccaatgacatgattactgagagttcactggatgttgctgaagaagaaatcatagacgatgatgatgatgacatcacccttacagttgaagcttcttgtcatgacggggatgaaacaattgaaactattgaggctgctgaggcactcctcaatatggattcccctggccctatgctggatgaaaaacgaataaataataatatatttagttcacctgaagatgacatggttgttgccccagtcacccatgtgtccgtcacattagatgggattcctgaagtgatggaaacacagcaggtgcaagaaaaatatgcagactcaccgggagcctcatcaccagaacagcctaagaggaaaaaaggaagaaaaactaaaccaccacgaccagattccccagccactacgccaaatatatctgtgaagaagaaaaacaaagatggaaagggaaacacaatttatctttgggagtttttactggcactgctccaggacaaggctacttgtcctaaatacatcaagtggacccagcgagagaaaggcatttttaaattggtggattctaaagcagtgtccaggttgtgggggaagcacaaaaacaaacctgatatgaattatgagaccatgggaagagcactcaggtactattaccaaaggggtattctggcaaaagtggaaggtcagcgcttggtgtatcagtttaaagaaatgccaaaagatcttatatatataaatgatgaggatccaagttccagcatagagtcttcagatccatcactatcttcatcagccacttcaaataggaatcaaaccagccggtcgagagtatcttcaagtccaggggtaaaaggaggagccactacagttctaaaaccagggaattctaaagctgcaaaacccaaagatcctgtggaagttgcacaaccatcagaagttttgaggacagtgcagcccacgcagtctccatatcctacccagctcttccggactgttcatgtagtacagccagtacaggctgtcccagagggagaagcagctagaaccagtaccatgcaggatgaaacattaaattcttccgttcagagtattaggactatacaggctccaacccaagttccagtggttgtgtctcctaggaatcagcagttgcatacagtaacactccaaacagtgccactcacaacagttatagccagcacagatccatcagcaggtactggatctcagaagtttattttacaagccattccatcatcacagcccatgacagtactgaaagaaaatgtcatgctgcagtcacaaaaggcgggctctcctccttcaattgtcttgggccctgcccaggttcagcaggtccttactagcaatgttcagaccatttgcaatggaaccgtcagtgtggcttcctctccatccttcagtgctactgcacctgtggtgaccttttctcctcgcagttcacagctggttgctcacccacctggcactgtaatcacttcagttatcaaaactcaagaaacaaaaactcttacacaggaagtagagaaaaaggaatctgaagatcatttgaaagagaacactgagaaaacggagcagcagccacagccttatgtgatggtagtgtccagttccaatggatttacttctcaggtagctatgaaacaaaacgaactgctggaacccaactctttttagttaatataccaaagcttatgaataattgtttgttaattgaacattttcaattatatgcagactgactgattctaagataaattctaaggaggtttctaattttgtaattgttaaaaatagagttaattttgactttgttagatgagggaggaaaactcaactgtttctctttgttatctaaatgtttcagaattcaatcgtgaaggaacaggcattttacactatgaagacattcttttgagatttttatttcagttgctatatcataagcatttttaaagtttcttttctaattttacattgtattagattttctgattcttttgtaaatacagaacttaaatagaaggcaacaggaaatttatataggaactattttcattccacttgtgtaagttaagtcttgactctttcaaatgcaaaaaacctattttatgctttgttaaaattatggtgtcacttagattgactttagttgactgcactatataatatagaactatgaatatgtagaataacatgaaaaattggaggtgctggtggtatggctgaccctgtttcagaagcaggatagtataaaagcatcagcctaagaatggcactcccactaactagctatgtaatcttgacctctttgggctttagttcctctcataaaaggaagagatgtattggattagactagattatcaccactttctcttctagttctaatttttttaattctaatacctatattttcaagttatgtcaattaaatcattatcaggttatttcctaatgtaagaatagctaaaatgttgcagagaaataagtgacccaacaaaatttattcatctgttatgggtaagatctgccataaattcttcctaaataatttgtttactaactctttaggccactgtgctttgcggtccattagtaaacttgtgttgctaagtgctaaacagaatactgctattttgagagagtcaagactctttcttaagggccaagaaagcaacttgagccttgggctaatctggctgagtagtcagttataaaagcataattgctttatattttggatcattttttactgggggcggacttggggggggttgcatacaaagataacatatatatccaactttctgaaatgaaatgtttttagattactttttcaactgtaaataatgtacatttaatgtcacaagaaaaaaatgtcttctgcaaattttctagtataacagaaatttttgtagatgaaaaaaatcattatgtttagaggtctaatgctatgttttcatattacagagtgaatttgtatttaaacaaaaatttaaattttggaatcctctaaacatttttgtatctttaattggtttattattaaataaatcatataaaaattctcaaaaaaaaaaaaaaa

SEQ ID NO: 27 - DNA, 3302 bp, Homo sapiens
cggtgctgccgccgttgccgggagccgcggagacaagtcattacgttttcatttctcacaactgggctgagcacaactgaaccatgggggaacacagtccagacaacaacatcatctactttgaggcagaggaagatgagctgacccccgatgataaaatgctcaggtttgtggataaaaacggactggtgccttcctcatctggaactgtttatgataggaccactgttcttattgagcaggaccctggcactttggaggatgaagatgacgacggacagtgcggagaacacttgccttttctagtagggggtgaagagggctttcacctgatagatcatgaagcaatgtcccagggttatgtgcagcacattatctcaccagatcagattcatttgacaataaaccctggttccacacccatgccaagaaatattgaaggtgcaaccctcactctgcagtcggaatgtccggaaacaaaacgtaaagaagtaaagcggtaccaatgtacctttgagggctgtccccgcacctacagcacagcaggcaacctgcgaacccaccagaagactcaccgaggagagtacacctttgtctgtaatcaggagggctgtggcaaagccttccttacctctcacagcctcaggatccacgtgcgagtgcacacgaaggagaagccatttgagtgtgacgtgcagggctgtgagaaggcattcaacacactgtacaggctgaaagcacatcagaggcttcacacagggaaaacgtttaactgtgaatctgaaggctgcagcaaatacttcaccacactcagtgatctgaggaagcacattcgaactcatacaggggaaaagccatttcggtgcgatcacgatggctgtggaaaagcatttgcagcaagccaccaccttaaaactcacgttcgtacacatactggtgaaagacccttcttctgccccagtaatggctgtgagaaaacattcagcactcaatacagtctcaaaagtcacatgaaaggtcatgataacaaaggacactcatacaatgcacttccacaacacaatggatcagaggatacaaatcactcactttgtctaagtgacttgagccttctgtccacagattctgaattgcgagaaaattccagtacgacccagggccaggacctcagcacaatttcaccagcaatcatctttgaatcaatgttccagaattcagatgatacggcaattcaggaagatcctcaacagacagcttccttgactgaaagttttaatggtgatgcagagtcagtcagtgatgttccgccatccacaggaaattcagcatctttatctcttccacttgtactgcaacctggcctctccgagccaccccagcctctactacctgcctcagctccgtctgctcctccgcctgctccctccctaggacctggctcccagcaagctgcatttggcaacccccctgctctcttacaacctccagaagtgcctgttccccacagcacacagtttgctgctaatcatcaagagtttcttccgcacccccaggcaccgcagcccattgtaccaggactttctgttgttgctggggcttctgcatcagcagcggcagtggcatcagctgtggcagcaccagccccaccacaaagtactactgagcccctgccagccatggtccagactctgcccctgggtgccaactctgtcctaactaataatcccacaataaccatcaccccaactcccaacacagctatcctgcagtccagcctagtcatgggagaacagaacttacaatggatattaaatggtgccaccagttctccacaaaaccaagaacaaattcagcaagcatctaaagttgagaaggtgttttttaccactgcagtaccagtagccagtagcccagggagctctgtccagcagattggcctcagtgttcctgtgatcatcatcaaacaagaagaggcatgtcagtgtcagtgtgcatgccgggactctgcaaaggagcgggcatccagcaggagaaagggctgctcctccccaccccctccagagccgagcccccaggctcctgatgggcccagcctgcagctcccagcgcagactttctcttcagcccctgttcccgggtcatcatcctctaccttgccctcctcctgtgagcaaagccgacaagcagagactccttcagaccctcagacagaaacattaagtgccatggatgtgtcagagtttctatccctccagagcctggacaccccgtccaatctgattcccattgaagcactactgcagggggaggaggagatgggcctcaccagcagcttctccaagtgaagggcccatgtgtgctcacctctgggaaaagcgggtgagcaggaggcatgaggtacaatgcctgccatcatgggtcagaaatttgaaggatgaagaaatctactgtttgaaatcctcacctttcagacgtattttctttattcacatcccaggagcatccattttaaggaactattctttggaaaaaaacaaaaaacaaaaaaaacaacaaaaaaagctaagttataagtgaactgtttggctgcactgtatgtcacttttgcttgttgtcatgtgaacttggaaactaaggttactcgtgtgcataaaaattctaaatgaaagggtgtggtttccatcaatctgatgctgcccatcgcttgcactggggtctttgtggatcgggcaggagttttcagtgtgttgggtgttgctccttcctatgtgtcttttgaatctgaggctgacatttgcttggaaggccagacccttgctccatcagagagggcagtggcaaaggccagtgaggcagctgtgagttggacagggttcaggtgagatggtgttgtcatttgtgcttagtgttggtggtgctcagggtggataacacgggtcgttctgcagcccgcttcagcacaaataggcagcttaaggcctggctcacaggctgtggggttgatctggctctgcagaggccctaggcagcttgttgactgctgtctgttgatgacgtgtgtgcaaagcaggctctagcaacatgatcactgtccttgccttcctggttctttctctcggttggttgccagggcttgcagatcgcagtgaattttccttggggaacatcgctgttttgtcctagagtgaacttgtggcttatggccagtgctgtttggtggtctgccttctttttaatggtattttcttcctcagagcagaagggctgcattttgcttatcagaagaaggtgcagatttaagg

SEQ ID NO: 28 - DNA, 390 bp, Homo sapiens
ccttcctctcctagcctaaggcgtgcaaacagagcgccactgggaggctgaaacctttaggccgatgcttgcttgcaaggtcaggcaagctggattctggtccccacctttgcagagagaacagcgatgttgtgcgcccatttctcagatcaaggaccggcccatcttactacctccaagagtgcttttctctctaataagaaaacatctactttgaaacatctactgggcgagaccaggagtgatggctcagcctgtaattctggaatttcgggaggccgaggcaggaagattccttgagcacaggagttccagaccagcctgggcaatgtagcaagacgctgtctctatttatacaataaaaaaaaaaaaaaaaaaaaaaaaaaaaaa

SEQ ID NO: 29 - DNA, 2564 bp, Homo sapiens
agatacacggtttttaagaaagaacttctaaccccactccaccgcccaacggtcacgtgacgcgcctgcgtcctcgcctcaaggttttttctggtcgcatattggctgttaactcggctacggggtgtagcgaggtgcattccggaagtaggtcctttgacttttgcttcctctacggaggcaagtaacaacccggcggtcgacgcttagcggaagttcgtcaagtcgcagttgcccccgcacagcggatgtgggtcgcctcttaggtgacgctgggaagtgcctgcaaccttcgccgctgccttctggttgaagcactatggagggagagaggaagaacaacaacaaacggtggtatttcactcgagaacagctggaaaatagcccatcccgtcgttttggcgtggacccagataaagaactttcttatcgccagcaggcggccaatctgcttcaggacatggggcagcgtcttaacgtctcacaattgactatcaacactgctatagtatacatgcatcgattctacatgattcagtccttcacacagttccctggaaattctgtggctccagcagccttgtttctagcagctaaagtggaggagcagcccaaaaaattggaacatgtcatcaaggtagcacatacttgtctccatcctcaggaatcccttcctgatactagaagtgaggcttatttgcaacaagttcaagatctggtcattttagaaagcataattttgcagactttaggctttgaactaacaattgatcacccacatactcatgtagtaaagtgcactcaacttgttcgagcaagcaaggacttagcacagacttcttacttcatggcaaccaacagcctgcatttgaccacatttagcctgcagtacacacctcctgtggtggcctgtgtctgcattcacctggcttgcaagtggtccaattgggagatcccagtctcaactgacgggaagcactggtgggagtatgttgacgccactgtgaccttggaacttttagatgaactgacacatgagtttctacagattttggagaaaactcccaacaggctcaaacgcatttggaattggagggcatgcgaggctgccaagaaaacaaaagcagatgaccgaggaacagatgaaaagacttcagagcagacaatcctcaatatgatttcccagagctcttcagacacaaccattgcaggtttaatgagcatgtcaacttctaccacaagtgcagtgccttccctgccagtctccgaagagtcatccagcaacttaaccagtgtggagatgttgccgggcaagcgttggctgtcctcccaaccttctttcaaactagaacctactcagggtcatcggactagtgagaatttagcacttacaggagttgatcattccttaccacaggatggttcaaatgcatttatttcccagaagcagaatagtaagagtgtgccatcagctaaagtgtcactgaaagaataccgcgcgaagcatgcagaagaattggctgcccagaagaggcaactggagaacatggaagccaatgtgaagtcacaatatgcatatgctgcccagaatctcctttctcatcatgatagccattcttcagtcattctaaaaatgcccatagagggttcagaaaaccccgagcggccttttctggaaaaggctgacaaaacagctctcaaaatgagaatcccagtggcaggtggagataaagctgcgtcttcaaaaccagaggagataaaaatgcgcataaaagtccatgctgcagctgataagcacaattctgtagaggacagtgttacaaagagccgagagcacaaagaaaagcacaagactcacccatctaatcatcatcatcatcataatcaccactcacacaagcactctcattcccaacttccagttggtactgggaacaaacgtcctggtgatccaaaacatagtagccagacaagcaacttagcacataaaacctatagcttgtctagttctttttcctcttccagttctactcgtaaaaggggaccctctgaagagactggaggggctgtgtttgatcatccagccaagattgccaagagtactaaatcctcttccctaaatttctccttcccttcacttcctacaatgggtcagatgcctgggcatagctcagacacaagtggcctttccttttcacagcccagctgtaaaactcgtgtccctcattcgaaactggataaagggcccactggggccaatggtcacaacacgacccagacaatagactatcaagacactgtgaatatgcttcactccctgctcagtgcccagggtgttcagcccactcagcccactgcatttgaatttgttcgtccttatagtgactatctgaatcctcggtctggtggaatctcctcgagatctggcaatacagacaaaccccggccaccacctctgccatcagaacctcctccaccacttccaccccttcctaagtaaaaaaagaaaaagaagaggagaaaaaaacttctttaaaaaaacacataatttttctttttttttt

SEQ ID NO: 30 - DNA, 2948 bp, Homo sapiens
gcgtgcgcaatgggccacagaaccgccatgccggaaccgcgcgggtcgtcgcagctgcgggtgaacgcggcgtttgccgcgcggtacaaccgctaccgggagcgcgaggaactgcagcggcgaatttgatccccagcaggagcgggacttttacaaaacgctctccttgttgaagaagaaggacccccgcatttatcagaaagatgccaccttctataacagaacagcatcgtcatcagacagtgaggaggacccagaagccttggagaagcagaagaaagtgcggcccatgtacctgaaggactacgagaggaaggttatcttggagaaggcaggcaaatatgttgatgaggagaactcagacggggagacttccaatcacagactccaggagacatcgtcgcaaagttatgtggaggaacagaaacagctcaaggaaagcttccgggcatttgtggaggacagtgaggacgaggacggcgctggggagggcggctccagtttgctgcagaaacgtgccaaaaccaggcaggagaaggcccaggaggaggccgactacatcgagtggctgaagggacagaaagagattcggaacccagattccctgaaggaactgacgcatctcaaggaatactggaacgaccctgagttggatgaaggggagcggttcctgcgggattacatcctcaacaaacgctatgaggaggaggaagaggaggaggaagatgaagaggaaatggaggaagagaagggggtccacggtcccccagtccagctggctgtggacgactcctcagacgaaggggagctgtttctgaagaaacaggaggactttgaacagaagtacaatttccgtttcgaggagccggactcagcatcggtcaagacctacccacgcagcatcgcgtcctccgtgcgccgtaaggatgagcgcagaaaggagaagagggaagagactcgggagcgaaagaagagggagaaagcaaagaagcaggaagagctcaagcagctgaagaacctgaagaggaaggagattctggccaagctggagaagctgcggaaagtaacaggcaacgagatgctgggcctcgaggagggggaccttgaagacgacttcgaccctgcccagcacgaccagctcatgcagaagtgctttggggacgagtactacggggccgtggaggaggagaagccacaatttgaggaagaagaagggcttgaagacgactggaactgggacacgtgggacgggcctgagcaggagggagactggagccagcaggagctgcactgtgaggaccccaacttcaacatggacgccgactacgaccccagccagccgaggaagaaaaagcgcgaggcccccttgacgggcaagaagaagcgcaagtcgcccttcgccgcggccgtggggcaggagaagcccgtgttcgaacccggggacaagacgttcgaggagtacctggatgagtattaccggctggactacgaggacatcatcgacgacctgccctgtcgcttcaagtaccgcacagtggtgccctgtgactttggcctcagcactgaggagatcctcgctgctgacgataaggagctgaaccggtggtgctccctaaagaagacctgcatgtacaggtcagagcaggaggagctgcgggacaagcgggcgtacagccagaaggcccagaactcatggaaaaagcggcaggtcttcaagtcactctgccgagaagaggcagagacacctgcggaagccacagggaagccacagagagatgaagccggcccacagaggcagctgccagcccttgatggcagcttgatggggccggagagtcccccagcacaggaagaggaagcccctgtatcaccccacaagaagccagccccccagaagcggaggagggccaagaaggcacggctgctgggccccactgtgatgcttggtggatgcgagttcagccgccagagactgcaggcctttggcctcaaccccaaacggctgcacttccgccagctgggccggcagcggaggaaacaacaggggcccaagaacagctcctgagcaccagggagcaggcaggggcctcaggctcctctcctcaaatcaagccctggacaggtctcgcacccacaagtactatctgctgcagagatcctctcatctgtggccaggcacgcctgtaatcccagcactttgggaggccgaggtgaaaggatcacttgagcccaggaattggagaccagcgtgggcaacttagcgagactccatctctacaaaatgtggtgacacatgcctgtagtcccagctactcaggaggctggggaaggaagatcacttaaggccatgagtttgaggctacagagagctatgattgcaccactgcactccagcctgggcaacaaagcaagaccctgtctcttgaaaaaaaaaaaaaaattaaaaaacacgtgtagctgtgggtaaggaagtcgtcccattttatggatgtggaaactgaggctgacttaaacttcccgtgacttggagctctcacctcgagacacctcccagaccccacatcccctcagaacgctgcgcccagccacacccacgatcaagttacacagctttattggcccccagcagccacagttcccccaagggggctttgggacagggagggcccgggcgtccagtgcaaactacagtacgtgagtcaggccctgaggggggtgcccggggtcctccttccctaccctgccaggagggccccgctggtgggagacaggtgtatgggctctgtgggctctgtccctggctgaatggccccagactggttgcagctgggcttgaggggctgacaacaggaagtaccatcatcactgccagagctcaagatcccacacccgacatgacataaataaaaaaataaatagtgttgtatctttaaaaaaaaaaaaaaaaa

SEQ ID NO: 31 - DNA, 3022 bp, Homo sapiens
gcgtgcgcaatgggccacagaaccgccatgccggaaccgcgcgggtcgtcgcagctgcgggtgaacgcggcgtttgccgcgcggtacaaccgctaccgggagcgcgaggaactgcagcggctgaaggatcgctacggggaccgagacagcagcagcgactccagctccgagtcggactcaagcgacgagcgcgtggaatttgatccccagcaggagcgggacttttacaaaacgctctccttgttgaagaagaaggacccccgcatttatcagaaagatgccaccttctataacagaacagcatcgtcatcagacagtgaggaggacccagaagccttggagaagcagaagaaagtgcggcccatgtacctgaaggactacgagaggaaggttatcttggagaaggcaggcaaatatgttgatgaggagaactcagacggggagacttccaatcacagactccaggagacatcgtcgcaaagttatgtggaggaacagaaacagctcaaggaaagcttccgggcatttgtggaggacagtgaggacgaggacggcgctggggagggcggctccagtttgctgcagaaacgtgccaaaaccaggcaggagaaggcccaggaggaggccgactacatcgagtggctgaagggacagaaagagattcggaacccagattccctgaaggaactgacgcatctcaaggaatactggaacgaccctgagttggatgaaggggagcggttcctgcgggattacatcctcaacaaacgctatgaggaggaggaagaggaggaggaagatgaagaggaaatggaggaagagaagggggtccacggtcccccagtccagctggctgtggacgactcctcagacgaaggggagctgtttctgaagaaacaggaggactttgaacagaagtacaatttccgtttcgaggagccggactcagcatcggtcaagacctacccacgcagcatcgcgtcctccgtgcgccgtaaggatgagcgcagaaaggagaagagggaagagactcgggagcgaaagaagagggagaaagcaaagaagcaggaagagctcaagcagctgaagaacctgaagaggaaggagattctggccaagctggagaagctgcggaaagtaacaggcaacgagatgctgggcctcgaggagggggaccttgaagacgacttcgaccctgcccagcacgaccagctcatgcagaagtgctttggggacgagtactacggggccgtggaggaggagaagccacaatttgaggaagaagaagggcttgaagacgactggaactgggacacgtgggacgggcctgagcaggagggagactggagccagcaggagctgcactgtgaggaccccaacttcaacatggacgccgactacgaccccagccagccgaggaagaaaaagcgcgaggcccccttgacgggcaagaagaagcgcaagtcgcccttcgccgcggccgtggggcaggagaagcccgtgttcgaacccggggacaagacgttcgaggagtacctggatgagtattaccggctggactacgaggacatcatcgacgacctgccctgtcgcttcaagtaccgcacagtggtgccctgtgactttggcctcagcactgaggagatcctcgctgctgacgataaggagctgaaccggtggtgctccctaaagaagacctgcatgtacaggtcagagcaggaggagctgcgggacaagcgggcgtacagccagaaggcccagaactcatggaaaaagcggcaggtcttcaagtcactctgccgagaagaggcagagacacctgcggaagccacagggaagccacagagagatgaagccggcccacagaggcagctgccagcccttgatggcagcttgatggggccggagagtcccccagcacaggaagaggaagcccctgtatcaccccacaagaagccagccccccagaagcggaggagggccaagaaggcacggctgctgggccccactgtgatgcttggtggatgcgagttcagccgccagagactgcaggcctttggcctcaaccccaaacggctgcacttccgccagctgggccggcagcggaggaaacaacaggggcccaagaacagctcctgagcaccagggagcaggcaggggcctcaggctcctctcctcaaatcaagccctggacaggtctcgcacccacaagtactatctgctgcagagatcctctcatctgtggccaggcacgcctgtaatcccagcactttgggaggccgaggtgaaaggatcacttgagcccaggaattggagaccagcgtgggcaacttagcgagactccatctctacaaaatgtggtgacacatgcctgtagtcccagctactcaggaggctggggaaggaagatcacttaaggccatgagtttgaggctacagagagctatgattgcaccactgcactccagcctgggcaacaaagcaagaccctgtctcttgaaaaaaaaaaaaaaattaaaaaacacgtgtagctgtgggtaaggaagtcgtcccattttatggatgtggaaactgaggctgacttaaacttcccgtgacttggagctctcacctcgagacacctcccagaccccacatcccctcagaacgctgcgcccagccacacccacgatcaagttacacagctttattggcccccagcagccacagttcccccaagggggctttgggacagggagggcccgggcgtccagtgcaaactacagtacgtgagtcaggccctgaggggggtgcccggggtcctccttccctaccctgccaggagggccccgctggtgggagacaggtgtatgggctctgtgggctctgtccctggctgaatggccccagactggttgcagctgggcttgaggggctgacaacaggaagtaccatcatcactgccagagctcaagatcccacacccgacatgacataaataaaaaaataaatagtgttgtatctttaaaaaaaaaaaaaaaaa

SEQ ID NO: 32 - DNA, 2044 bp, Homo sapiens
ctggacgagtccgagcgcgtcacctcctcacgctgcggctgtcgcccgtgtcccgccggcccgttccgtgtcgccccgcagtgctgcggccgccgcggcaccatggctgtgtttgtcgtgctcctggcgttggtggcgggtgttttggggaacgagtttagtatattaaaatcaccagggtctgttgttttccgaaatggaaattggcctataccaggagagcggatcccagacgtggctgcattgtccatgggcttctctgtgaaagaagacctttcttggccaggactcgcagtgggtaacctgtttcatcgtcctcgggctaccgtcatggtgatggtgaagggagtgaacaaactggctctacccccaggcagtgtcatttcgtaccctttggagaatgcagttccttttagtcttgacagtgttgcaaattccattcactccttattttctgaggaaactcctgttgttttgcagttggctcccagtgaggaaagagtgtatatggtagggaaggcaaactcagtgtttgaagacctttcagtcaccttgcgccagctccgtaatcgcctgtttcaagaaaactctgttctcagttcactccccctcaattctctgagtaggaacaatgaagttgacctgctctttctttctgaactgcaagtgctacatgatatttcaagcttgctgtctcgtcataagcatctagccaaggatcattctcctgatttatattcactggagctggcaggtttggatgaaattgggaagcgttatggggaagactctgaacaattcagagatgcttctaagatccttgttgacgctctgcaaaagtttgcagatgacatgtacagtctttatggtgggaatgcagtggtagagttagtcactgtcaagtcatttgacacctccctcattaggaagacaaggactatccttgaggcaaaacaagcgaagaacccagcaagtccctataaccttgcatataagtataattttgaatattccgtggttttcaacatggtactttggataatgatcgccttggccttggctgtgattatcacctcttacaatatttggaacatggatcctggatatgatagcatcatttataggatgacaaaccagaagattcgaatggattgaatgttacctgtgccagaattagaaaagggggttggaaattggctgttttgttaaaatatatcttttagtgtgctttaaagtagatagtatactttacatttataaaaaaaaatcaaattttgttctttattttgtgtgtgcctgtgatgtttttctagagtgaattatagtattgacgtgaatcccactgtggtatagattccataatatgcttgaatattatgatatagccatttaataacattgatttcattctgtttaatgaatttggaaatatgcactgaaagaaatgtaaaacatttagaatagctcgtgttatggaaaaaagtgcactgaatttattagacaaacttacgaatgcttaacttctttacacagcataggtgaaaatcatatttgggctattgtatactatgaacaatttgtaaatgtcttaatttgatgtaaataactctgaaacaagagaaaaggtttttaacttagagtagccctaaaatatggatgtgcttatataatcgcttagttttggaactgtatctgagtaacagaggacagctgttttttaaccctcttctgcaagtttgttgacctacatgggctaatatggatactaaaaatactacattgatctaagaagaaactagccttgtggagtatatagatgcttttcattatacacacaaaaatccctgagggacattttgaggcatgaatataaaacatttttatttcagtaacttttccccctgtgtaagttactatggtttgtggtacaacttcattctatagaatattaagtggaagtgggtgaattctactttttatgttggagtggaccaatgtctatcaagagtgacaaataaagttaatgatgattccaaaaaaaaaa

SEQ ID NO: 33 - DNA, 4000 bp, Homo sapiens
cggccgcttttttctcaagatggcagattcccactgaggctgagggggccgagctcgcgcgccgcgttcccttctccgttgccatgaaccgcggacaccccggccccgatggcccccgtgtacgaaggtatggcctcacatgtgcaagttttctcccctcacacccttcaatcaagtgccttctgtagtgtgaagaaactaaaagtagagccaagttccaactgggacatgactgggtacggctcccacagcaaagtgtacagccagagcaagaacataccaccttctcagccagcctccacaaccgtcagcacctccttgccggtcccaaacccaagcctaccttacgagcagaccatcgtcttcccaggaagcaccgggcacatcgtggtcacctcagcaagcagcacttctgtcaccgggcaagtcctcggcggaccacacaacctaatgcgtcgaagcactgtgagcctccttgatacctaccaaaaatgtggactcaagcgtaagagcgaggagatcgagaacacaagcagcgtgcagatcatcgaggagcatccacccatgattcagaataatgcaagcggggccactgtcgccactgccaccacgtctactgccacctccaaaaacagcggctccaacagcgagggcgactatcagctggtgcagcatgaggtgctgtgctccatgaccaacacctacgaggtcttagagttcttgggccgagggacgtttggacaagtggtcaagtgctggaaacggggcaccaatgagatcgtagccatcaagatcctgaagaaccgcccatcctatgcccgacaaggtcagattgaagtgagcatcctggcccggttgagcacggagagtgccgatgactataacttcgtccgggcctacgaatgcttccagcacaagaaccacacgtgcttggtcttcgagatgttggagcagaacctctatgactttctgaagcaaaacaagtttagccccttgcccctcaaatacattcgcccagttctccagcaggtagccacagccctgatgaaactcaaaagcctaggtcttatccacgctgacctcaaaccagaaaacatcatgctggtggatccatctagacaaccatacagagtcaaggtcatcgactttggttcagccagccacgtctccaaggctgtgtgctccacctacttgcagtccagatattacagggcccctgagatcatccttggtttaccattttgtgaggcaattgacatgtggtccctgggctgtgttattgcagaattgttcctgggttggccgttatatccaggagcttcggagtatgatcagattcggtatatttcacaaacacagggtttgcctgctgaatatttattaagcgccgggacaaagacaactaggtttttcaaccgtgacacggactcaccatatcctttgtggagactgaagacaccagatgaccatgaagcagagacagggattaagtcaaaagaagcaagaaagtacattttcaactgtttagatgatatggcccaggtgaacatgacgacagatttggaagggagcgacatgttggtagaaaaggctgaccggcgggagttcattgacctgttgaagaagatgctgaccattgatgctgacaagagaatcactccaatcgaaaccctgaaccatccctttgtcaccatgacacacttactcgattttccccacagcacacacgtcaaatcatgtttccagaacatggagatctgcaagcgtcgggtgaatatgtatgacacggtgaaccagagcaaaacccctttcatcacgcacgtggcccccagcacgtccaccaacctgaccatgacctttaacaaccagctgaccactgtccacaaccaggctccctcctctaccagtgccactatttccttagccaatcccgaagtctccatactaaactacccatctacactctaccagccctcagcggcatccatggctgcagtggcccagcggagcatgcccctgcagacaggaacagcccagatttgtgcccggcctgacccgttccagcaagctctcatcgtgtgtccccccggcttccaaggcttgcaggcctctccctctaagcacgctggctactcggtgcgaatggaaaatgcagttcccatcgtcactcaagccccaggagctcagcctcttcagatccaaccaggtctgcttgcccagcaggcttggccaagtgggacccagcagatcctgcttcccccagcatggcagcaactgactggagtggccacccacacatcagtgcagcatgccaccgtgattcccgagaccatggcaggcacccagcagctggcggactggagaaatacgcatgctcacggaagccattataatcccatcatgcagcagcctgcactattgaccggtcatgtgacccttccagcagcacagcccttaaatgtgggtgtggcccacgtgatgcggcagcagccaaccagcaccacctcctcccggaagagtaagcagcaccagtcatctgtgagaaatgtctccacctgtgaggtgtcctcctctcaggccatcagctccccacagcgatccaagcgtgtcaaggagaacacacctccccgctgtgccatggtgcacagtagcccggcctgcagcacctcggtcacctgtgggtggggcgacgtggcctccagcaccacccgggaacggcagcggcagacaattgtcattcccgacactcccagccccacggtcagcgtcatcaccatcagcagtgacacggacgaggaggaggaacagaaacacgcccccaccagcactgtctccaagcaaagaaaaaacgtcatcagctgtgtcacagtccacgactccccctactccgactcctccagcaacaccagcccctactccgtgcagcagcgtgctgggcacaacaatgccaatgcctttgacaccaaggggagcctggagaatcactgcacggggaacccccgaaccatcatcgtgccacccctgaaaacccaggccagcgaagtattggtggagtgtgatagcctggtgccagtcaacaccagtcaccactcgtcctcctacaagtccaagtcctccagcaacgtgacctccaccagcggtcactcttcagggagctcatctggagccatcacctaccggcagcagcggccgggcccccacttccagcagcagcagccactcaatctcagccaggctcagcagcacatcaccacggaccgcactgggagccaccgaaggcagcaggcctacatcactcccaccatggcccaggctccgtactccttcccgcacaacagccccagccacggcactgtgcacccgcatctggctgcagccgctgccgctgcccacctccccacccagccccacctctacacctacactgcgccggcggccctgggctccaccggcaccgtggcccacctggtggcctcgcaaggctctgcgcgccacaccgtgcagcacactgcctacccagccagcatcgtccaccaggtccccgtgagcatgggcccccgggtcctgccctcgcccaccatccacccgagtcagtatccagcccaatttgcccaccagacctacatcagcgcctcgccagcctccaccgtctacactggatacccactgagccccgccaaggtcaaccagtacccttacatataaacactggaggggagggagggagggagggagggagagaatggcccgagggaggagggagagaaggagggaggcgctcctgggaccgtgggcgctggccttttatactgaagatgccgcacacaaacaatgcaaacggggcaggggcggggggggggggggcagagggcagggggacgggtcgggacaccagtgaaacttgaaccgggaagtgggaggacgtagagcagagaagagaacatttttaaaaggaagggattaaagagggtgggaaatctatggtttttattttaaaaaa

SEQ ID NO: 34 - DNA, 5652 bp, Homo sapiens
cttgctgttaatgaacttggttaaacatggtcaagtgtatgtatgtatatattatcagtactggccttctctatctaagaggaatagcaagaaatttagagacattatttggacattgatttctactaactccactgaattagattcagccttcactttttgggaaatgcacggacactgggaaagatgaaatgaagaagttttccagcatgatgttcttgtctttggagcttagccttacttaggtcttagaacaaaaacaagtcggtagttattagttactgtatctcattttccaaaacacacgtttctttgttacagtcatttacacatatttttgcatgccacatttttgcttttgagcttttgctgaatcactaaatgaccacctttcatgttcctaatgtattaaaattatcagaggattctttgaggattaaatgtgtcagtaagggtattattttgaacaatgcgtaaaaggtgaaggccagctgaagaggcctttttgttgtgaacagaataatatactggaatctgaggactgcactgttatgaatggattatttggctatggaaagaagttatttttaggcacagcatccctataagccctgaagctatgtgttttacaaactagaaattatgcactaaataaaaattaccagatgtcagtctctgtatgtgccaaatggcaaatgtgtaatggttcagagcctggaagaaatgatgcttatttctttgccattcaaactcaaaagggatagctgaggtagagtgctgttgaaaaaattgcagtgtttccagctacccaaagatgttacgaattgttatctgaaaggctttcattctttcccctcatggctcgttgtgtgtttgtggcattacaaatgtaacccacatatttattctaatttattacattctttcctgaggctcctcttgttcttttaaagggtcagcagataacttattttaagaatcaacctggacacagtattctaacaaaggtccaatacagagctaaataaataataggagtcatagccagacacagtgactcacgcctgtaatcccaacattttgggaggccaaggcgggtggattacctggtggtgcatgcctgtagtctcagctactcaggaggctgaggcaggagaatcacttgaacccgggacgcagaggttacagtgaaccgagattgcgccactgcactccagcctgggcaacagagcgagacctctatctcaaaaataaataaataaatacatttaaaatatatatatatatatatatatatatatatatatatatatatatatatatatatatatttatatatatttcgtgacttatatcttgcacataccagcatacctcattaattttaatgtaaccatccattggcttctcttctctccttagaaattcgagctcaactggtagaacaacaaaaatgcctggagcagcaaacggagatgcgagttcagcttctccaggatctgcaagatttcttccgaaaaaaagctgaaattgagacggaatattcccggaatctagagaagttagcagaaaggttcatggcaaaaacaagaagcactaaggatcatcaacaatacaagaaagaccagaacctgttgtctccagtgaactgctggtatttgctcctgaaccaagtaaggagagaaagcaaagaccatgcaaccttgagtgacatctatctgaacaatgtgattatgcggttcatgcagataagtgaggattctaccaggatgtttaaaaagagcaaagagattgcattccaacttcatgaggatttaatgaaggttcttaatgagctttatacggtgatgaaaacataccatatgtatcatgcagagagcatcagtgcagagagcaagctgaaagaggccgaaaaacaagaggaaaagcaaattgggagatctggtgatccagtcttccatattcgactagaggagagacatcaacggcgaagctctgtaaagaaaattgaaaaaatgaaagaaaaaagacaagcaaaatattcagaaaataagctaaaatcaattaaggcacggaacgaatatctcctaacacttgaagccaccaatgcctcagttttcaagtactatattcatgatctttctgatttaattgattgctgtgatcttggctaccatgcaagtctgaacagagccctaagaacatatctgtctgcggagtacaaccttgaaacctccagacatgagggcttagacattattgagaatgcagttgataatttagagcccaggagcgataagcagagattcatggagatgtaccctgctgcgttctgtccaccaatgaagtttgagtttcagtctcacatgggtgatgaggtgtgccaggtcagtgcccagcagccagtccaggcagagctcatgctcaggtaccaacagttgcagtcccgccttgccacgctcaaaatcgagaatgaagaggttaagaaaacgactgaagccaccttgcagacgatacaagatatggtcaccatcgaggactatgatgtttctgaatgcttccagcacagtcgttccacagaatcagtgaagtccactgtctctgaaacctacctgagtaaacccagcatcgccaagagaagagccaaccagcaggaaactgaacagttctacttcatgaaactcagagaatatttggaaggcagtaatctcatcacaaaacttcaagccaaacatgacttgctgcagaggaccctgggagaaggtcatagagctgaatatatgactacaagccgaggacgaagaaactcgcacacaagacatcaggactcaggacaggttattcccctcattgtggaaagctgtattcggttcatcaatctctatggtcttcagcatcaggggattttcagagtgtctggttcccaggtggaagtcaatgatattaaaaattcatttgagagaggtgaaaatcctttggctgatgaccagagtaaccatgatattaactcagttgctggcgttctgaagctctatttccgtgggctggaaaaccccctctttcctaaggaaagatttaacgatctgatttcttgtatcagaatagataatctctatgagagggcgcttcacatccgcaaactcctcctgactttgcccaggtcggtccttatagtgatgaggtacctctttgccttcctcaatcatctatcacagtacagcgatgagaatatgatggacccttataacctggccatttgctttggcccaacattgatgcctgtcccagaaatacaggatcaagtgtcttgccaggcacatgtgaatgaaattatcaaaaccatcatcatccaccatgagactattttcccagatgctaaagagctggatggccctgtttatgagaaatgtatggctggagatgactattgcgacagcccatacagtgagcacggtacattggaggaagtggaccaagatgctggtacagagccccacacaagtgaagatgaatgtgagccaatagaagcaatagccaagtttgactatgttgggcggtctgccagagaactatccttcaagaagggtgcctccctgctgctgtatcaccgtgcatctgaggactggtgggaaggcaggcacaacgggattgacgggctggtgcctcaccagtatatagtggtgcaggatatggatgatacgttttcagacactctgagccaaaaagccgacagtgaggccagcagtgggccagtcacggaagacaagtcctcatccaaggacatgaactccccgacagaccgtcatcctgacggctatttagccaggcaacgaaaaagaggagagccaccccctccagtaaggcgtcctggcaggaccagtgatggccattgcccgctccaccctccacatgccctttctaactcctcagttgacctagggtccccaagccttgccagtcacccccggggcctgctgcagaaccgtggcctcaacaatgacagtcctgagcggaggcgcaggcctggccatggcagcctgaccaacatcagccggcacgactccctcaagaagatcgacagccctcccattagaaggtccacgtcatcagggcaatacacgggcttcaatgaccacaagccactggacccagagacaattgctcaggatattgaagaaacgatgaacacagctttgaatgaactccgagaactggagagacagagcacagcaaagcatgcccctgatgtggtgctggataccctggagcaagtgaaaaactctcccacccctgccacttccacggaatctctcagccctttgcacaacgttgccctcaggagctccgagcctcagattcgacgtagcacgagctcctccagtgacacaatgagtactttcaagcctatggtggcacccagaatgggcgtgcagctgaagcctccagcccttaggccaaaacctgctgttcttccaaaaacaaatcctaccataggacctgccccacctccccagggtccaacagacaagtcatgcacaatgtaaaaaccagccaagcaaggccataaagggaggtgacttaaaaaagaaaatggattagtgacaaaagtcactgatccataactttccttagttttgtgcttataactggagatcttttggcttttctatgttgtcgaatgtaatgtctgagactagctaaattaacacgggcatttgtattttgtaatttttttaaataactggacatatgtcattttaaggacaatagaaacacttagacttacttgaaaatccaatgctgcaccacttgtaatgaaggcaacaccgctctccacattgtacagagcttcaggtttaatgtagcccagctgagtcagaaaggttgtgacctgaaggcagaagaacccgaatgccacacctcattggagtatagccagtgttggtctgtggcacttgggctgaaaggtgataatggcattgcgtggtagctgacaatgagcaccttcggttccatgtggagcggggtttagctcatgcaaaagacttgcaattgtctccatgggacgatcccagtgggactgtcagcccacagctcgagtgggttggatgcttgcctctttcctaacagttatttccccgggtccagcttaaagactcgatggaaggaggtagaacctctgctgttactgcttgaacttaacctgggaaaggagaggaagacaccatctccaaagctattaatgtcactccttttgcgagcatgattaggccccggagatttccaagtccccccatctacacttacaaacgattagaagggtttaattttaaagactttctggttacactactccacgaactcctccaaagatccgttattcaataactgcctagaaaatgtttccatctcctctaaatccctgtgttctcctctgtggaaatgaaggcagcaagaagcacctgaggccttggttcatgcagtgttctcttttgactaaatcacctaggttcctttaaacatgctacaaagcccaggcatggtggtgcacacctgtactcccagctactcgggtggtttacacaggaggatggctttgggcctagtagttcgagtccagcctgggcagcatagtgtgagaccctgtctctt

SEQ ID NO: 35 - DNA, 2920 bp, Homo sapiens
tgtcaaccagcactttttaagatgaactgtaaccaactagcttctcacatgcttctcatatggtaagagttaattttagctcatgaaacttttggttctgtgaaacacctgctgaacagactcctgggaagggggtctgtgggagtcgacatttatacaaccttccaggtgattctgagcttatcagagctggagaggcacttgctacccaggggcttggtgtggaacgtgagatgccaaagccaaattcaggcctctcagctcaaggcaccctgaagcacagctagtcactccagcacatgttgaagctgtgcatgtttacttcatgttgaactgttcatgttttatttttggaacactggggattggcaaaaaaaaaaaaaacccatgtgaataaagccttctagggcaccactgtgccgattgtgaaccacacgtggacaaaacaagccgcgcttgatagcaactacctacatgaccagcactcccctggatgctgatgctgccatgcgagacgggacgttggcgcagcagcatgccagccacccattgcttctcctgcttgccaactcaaccgtgctgctccctcagacaccatcacttgcgcctcccaagcaatggaagccctggcgatgctctcatgagcccctcactccagcagagcccctgaccaagccaggggagcaggacttttccagccaaggacacaacggactggtggctgtgagtacctccccacttgatcccacttcactggccctgggcgtgtggctctcagcagcctgggaaggagtgtgaagaagcaggtgggataagggccttgagagagaaggaaaaggcagcctagtcgatgctctctgctctccagtgctgactgggggctgggtcgaatgctcatctgcagccagctgtggacatcacaggctcctttcctccccttcccctaatggggaaaggtggtttccccatggcctgtgagggagtcagggagcttccagaaacaagctgacaaggtggggaagcatgtaaccaacacagcatgagagcaggcagcgtacctgcagagactgggggtgaacaccgccgtcttcgagaggcgccatgtgatcgggggtgcagctgtcactgaggagatcatcccagggtttaagttctcccgcgcgtcctacctgctcagcctgctgaggccgcagatttacactgatctggagctgaagaaacatgggctgaggcttcatcttcgaaacccctactccttcacccccatgctggaagagggtgcaggcagcaaggtgcccaggtgccttctgctgggcacagacatggcagaaaaccagaagcagatcgcccagttctcccagaaggatgcccaggtctttcccaaatatgaggagttcatgcatcgcttggcattagccattgaccctctgctggatgcggcccccgtggacatggcggccttccagcatggctccttgctgcaaaggatgaggtcgctctccaccctcaagcccctgctgaaggcaggccgcatcctgggagcccagcttccccgatattatgaggtcctcacagctcccattaccaaggtgctggatcagtggttcgagtctgagcctttaaaagccactctagccacagatgcagtgattggagccatgacaagtccccacactccggggagtgggtatgtgctgctgcaccatgtgatggggggcctggagggaatgcagggggcctggggctacgtccaggggggcatgggtgccctctctgatgcgatcgcaagctcagccaccacacatggagcaagcatcttcactgaaaagacagtggcgaaggtgcaggtgaacagtgaaggctgtgttcaaggagttgtgctggaagatggcacagaggtgagaagcaaaatggtgctgtccaacacatcaccgcagatcaccttcctgaagctgacgccacaggagtggcttcctgaggagttcctggagagaatctctcagctggacacccggtcgcctgtcaccaagatcaatggtaagaggcacaccacattgcagcactgtctcctttgacccatctgagtgagaaacctccaggctgggggcagctgaactcagtcatcatctccattcccggacctccagcctgtgtccccctgcagcctggtcagaagtggccgtagacaggctgcccagcttcctggcggcccccaatgctcccaggggccagccgctgccccatcaccaatgctccatccacctgaactgtgaagacaccctcctccttcatcaggcctttgaagatgccatggatggcctgccttcccacagtgtttgattgcatcgaggtctatgcccctggcttcaaggactctgtggttggcagagacatcctcacaccaccagatttggagagaatcttcgggcttcctggagggaacatattccactgcgccatgtccctggaccagctctacttcgcccgccccgtgcccctgcattctggctaccgctgccctctccagggcctgtatctctgtggaagtggggctcatcctggaggaggtgtgatgggagctgctgggcgaaatgcagcacatgtggcctttagggacctcaagagcatgtgaccctgaaccagctctgacccaggaagaagactccacccctgaattccaagtgctccattggatcagcttcccaggaagttcagcttcgggttagtacataaggccaccacaatgctcaagaaattattttagaaaaaacgtacgagttacatttagtgcaagttgaccttatgcccatgcctccatacatggactggttctgttttattaaaactaatatttcatacaaaaaaaaaaaaaaaaaaaaaaaaaaaaaaaaaaaaaaaaaaaaaaaaaaaaaaaaaaaaa

SEQ ID NO: 36 - DNA, 2129 bp, Homo sapiens
cgtaatggcggacacaggcagggcgagcgcggctgggggcgtagcgcgctgagggggtccggccgtttggcagcccgcgaggcggtccgcgggagcacactctgtgcggagactgggcggccggccgacccttcctgtcgctgacggcgactgcgggaggccaggttgtttttcaccattcagaacattgcctgaagcaggtccaccatgccgttagtaacgaggaacatcgagccaaggcacctgtgccgtcagacgttgcctagcgttagaagcgagctggaatgcgtgaccaacatcaccctggcaaatgtcatccgacagctgggcagcctgagtaaatatgcagaggacatttttggagagctctttactcaggcaaatacctttgcctctcgggtaagctcccttgctgagagggtcgaccgactacaggttaaagtcactcagctggatcccaaggaagaagaagtgtcactgcaaggaatcaacacccgaaaagccttcagaagttccaccattcaagaccagaagctttttgacagaaactctctcccagtgcctgtcttagaaacatacaatacctgtgatactcctccccctctcaacaatcttaccccttacagggacgatggaaaagaggcactcaaattctacacagacccttcatacttctttgatctttggaaggagaagatgctgcaggacaccaaggatatcatgaaagagaagagaaagcataggaaagaaaagaaagataatccaaatcgagggaatgtaaacccacgtaaaatcaagacacgtaaggaagagtgggagaaaatgaagatggggcaagaatttgtggagtccaaagaaaagctggggacttctgggtatccacccactttggtgtaccagaatggcagcattggctgtgttgaaaacgtggatgcaagtagctatccgccaccaccacagtcagactctgcttcttcaccttctccttccttctccgaggacaacttgcctcctccaccagcagaattcagttacccagtggacaaccaaagaggatctggtttggctggacccaaaagatccagtgtggtcagcccaagccatccaccaccagctcctcctctaggctctccaccaggccctaaacccgggtttgctccaccacctgcccctccgccacctccgcctccaatgataggcatcccacctccaccaccgcctgtaggatttgggtctccagggacgcctccaccaccctcacccccatctttcccacctcaccctgattttgctgcccctccacctcctcctccaccaccagcagctgactacccaactctgccaccacctcccttgtcccagccaacaggaggagcacctcctcctccccctcctcctcctcctccggggccccctcctccccctttcactggtgcagatggccaacctgctataccaccaccgctttctgataccaccaagcccaagtcctccttgcctgccgtgagcgatgcccgtagcgacctgctttcagccatccgtcaaggttttcagctgcgcagggttgaggagcagcgggaacaagagaagcgggatgttgtgggcaatgacgtggccaccatcttgtctcgtcgcattgctgttgagtacagtgactcagaagatgactcctctgaatttgatgaggacgactggtccgattaactctttctgcctgctgcccaccttctttttctttccttcctacctgccttctttgatgccaaccccaacagacccgtagggggagaaaagggaggaaaaaagtaattttaaggggccaaagctttccctgaagcaaccaaagatatatccaagtgcttcctccaagtcaacatgtatttcctctccccattttcaggccctgtggggctcctgaggttcagtagctgggatgttccctctttccttcaagtgcctgttgcatattgaaaggaaggagaaatcccaaagcagattcctttgatcgggtttctgttggagatggggcttcccttaggagccatattcaactacagccttctaaaacctgtgccctcagccactttaaaaaaaaaaaaaaaaaaaaaaaaaaaaaaaaaaaaaaaaaa

SEQ ID NO: 37 - DNA, 4878 bp, Homo sapiens
gtccgccatttgcaaggggcccggagcgggatcgcggcacctgccgagcgggtcgccgcctctgccgcggtccttggaccccgccgccgccctggcctgggagcttgccccgccgcagcggccggcagcgcggcgctccgcgggcggcaggcacgggccccgggccccctcacggcgcccagccgcgggcctcccgaggcaaaagcccgtgggccgccgcgatggccctcaagatggtgaagggcagcatcgaccgcatgttcgacaagaatctgcaggacttggtccgcggcatccgtaaccacaaggaggacgaggcaaaatacatatctcagtgcattgatgagatcaagcaggagctgaagcaggacaacatagcggtgaaggcgaacgcggtctgcaagctgacgtatttacagatgttgggatacgacatcagctgggccgccttcaacatcatagaagtgatgagtgcctccaagttcaccttcaagcgaattggctacctcgctgcttcccagagctttcacgaaggcaccgacgtcatcatgctgaccaccaatcagatccgtaaggacttgagcagccccagccagtacgacacaggtgttgcactgacgggtctgtcctgcttcgtcaccccagaccttgccagagacctggcaaatgacatcatgacactgatgtcacacaccaagccctacatcaggaagaaggctgtgctgatcatgtacaaggtgttcctgaagtaccccgagtcgctgcgccctgcctttccccggctgaaggagaagctggaggaccccgaccccggggttcagtcggctgccgtcaatgtcatctgcgagctggccagacgcaaccctaagaactacctgtccctggccccgctctttttcaagctgatgacgtcctccaccaacaactgggtcctcatcaagatcatcaagctgttcggtgctcttactcctttggaaccgcggctgggcaagaagctgatcgagcccctcaccaatctcatccacagcacgtctgccatgtctctcctctatgaatgtgtgaacaccgtgattgcagtgctcatctcgctgtcctccggcatgcccaaccacagcgccagcatccagctttgtgttcagaaattaaggatattgatcgaggactccgatcagaacttgaagtacctggggctgctggcaatgtccaagatcctgaagacccaccccaagtccgtgcagtcccacaaggacctcatcctgcagtgcctggacgacaaggacgagtccatccggctgcgggccctggacctgctctatgggatggtgtccaagaagaacctgatggagatcgtgaagaagctgatgacccacgtagacaaggcagagggtaccacctaccgtgacgagctgctcaccaagatcattgacatctgcagccagtccaactaccagtacatcaccaacttcgagtggtacatcagcatcctggtggagctgacccggctggagggcacacggcacggccacctcatcgccgcccaaatgctggacgtggccatccgcgtgaaggccatccgcaagttcgccgtgtcccagatgtctgcgctgcttgacagtgcacacctgctggccagcagcacccagcggaacgggatctgtgaggtgctgtacgctgccgcctggatctgcggggagttctcagagcatctgcaggaaccacaccacactttggaggccatgctgcggcccagagtcaccacgctgccaggccacatccaggccgtgtatgtgcagaacgtggtcaagctctacgcctccatcctgcagcagaaggagcaggccggggaggcagagggcgctcaggccgtcacccagctcatggtggaccggctgccccagtttgtgcagagcgcagacctggaggtgcaggagcgggcgtcctgcatcctgcagctggtcaagcacatccagaagcttcaggccaaggacgtgcctgtggcagaggaggtcagcgctctctttgctggggagctgaacccagtggcccccaaggcccagaagaaggttccagtccccgaaggcctggacctggacgcctggatcaatgagccactctcggacagcgagtcagaggacgagaggcccagggccgtcttccacgaggaggagcagcggcgtcccaagcaccggccgtcggaggcggacgaggaagagctggctcggcgccgagaggcccggaagcaggagcaggccaacaaccccttctacatcaagagctcgccatcgccacagaagcggtaccaggacaccccgggcgtggagcacattcccgtggtgcagattgacctctccgtccccttgaaggttccagggctgcctatgtcagatcagtatgtgaagctggaggaggagcggcggcaccggcagaagctggagaaggacaagaggaggaaaaagaggaaggagaaggagaagaagggcaagcgccgccacagctcgctgcccacggagagcgacgaggacatcgcccctgcccagcaggtggacatcgtcacagaggagatgcctgagaatgctctgcccagcgacgaggatgacaaagaccccaacgacccctacagggctctggatattgacctggataagcccttagccgacagcgagaaactgcctattcagaaacacagaaacaccgagacctcaaaatcccctgagaaggacgttcccatggtagaaaagaagagcaagaaacccaagaagaaagagaaaaaacacaaagagaaagagagagacaaggagaagaagaaggagaaggagaagaagaaatctcccaagcctaagaagaagaagcacaggaaggagaaggaggagcggaccaaaggcaagaagaagtccaagaagcagcctccaggcagcgaggaggcagcgggggagccggtgcagaatggcgcgccagaggaggagcagctcccgcctgagtccagctactccctcctcgctgaaaattcctatgttaaaatgacctgtgacatccggggcagtctgcaggaggacagccaggtcactgtggccatcgtgctggagaacaggagcagcagcatcctcaagggcatggagctcagcgtgctggactcactcaatgccaggatggcccggccgcagggctcctccgtccacgatggcgtccccgtgcctttccagctgcccccaggcgtctccaacgaagcccagtatgtgttcaccatccagagcatcgtcatggcgcagaagctcaaggggaccctgtccttcattgccaagaatgacgagggtgcgacccacgagaagctggacttcaggctgcacttcagctgcagctcctacttgatcaccactccctgctacagtgacgcctttgctaagttgctggagtctggggacttgagcatgagctcaatcaaagtcgatggcattcggatgtccttccagaatcttctggcgaagatctgttttcaccaccatttttccgttgtggagcgagtggactcctgcgcctccatgtacagccgctccatccagggccaccatgtctgcctcctggtgaaaaaggtgagaactctgtctcagtcgacgggaagtgcagtgactccacgctactgagcaacttgttagaagagatgaaggcgacgctggccaagtgttgagagctgcctgcgagccccgcaccaccccgcggagcacgtacccagggaccgcagccctgacgtgtctcgcctctcctcagtcgtgtgtactgtacccaagcctgagtgttaatttaactctatgttgtccgccgtgtagacatccgaggtcatttgttgcgttgaattatctgaccatccttttttactgtgactcttcccattctctttggcaagaagtccccttctcgcccccaaaccagcaagggactcccccacctgggtctgtgccctgccccgcgctgggggccgagtccttgaatgtggcttcaggggctcctgtcctgggccagggcctgatgggcaccacgtgaggggcacttggtggacagggcggggctgacgtggcctcctctggggtcgcctgcttttgacccaaaggtcctgacggttgcgtccgggggaggggaaggaagggccgctgtcgccaaggttttctctcccagaacccacagtgggaaagcggtcttgccaggcgttgtccattgtcagtgtgctcgtgggctggtgactgggtcttgggatcccaggccacgcgccagccaggctgtgggcagggcggggccagggacgccaaagagaggttgcagtcagaaccgtggacggggtgggttgaggcctctctgccacccgtcttcctggtcagcagaagtgcatctcggcttgggtttggggtggtccgcatcccctgcttgccactatgcgcaccaaggtttccccacatccttcccagcacccttaggaaggcccaggcagggcctggaagcagcggacctgggctgttctgtgttgaaggagtgtgcccagtgcccttgggcaggacctgtgagagccacctcacaggcagagcccccaccaggcagggcaaggagactccgctcactccccacggccagcgtgggcacaggactgacccttcttcagagataatgacattttatcttctccttttgatgaaaactgtcactttagcatgtaatccattacagaatcccatgcagtgattccaggatttgaaattgtatgatgtgttacataagaatttatttgctatcgacattcccgtataaagagagagacatatcacgctgctgtcatgattttgtgtcaagatgatccaataaagttgtaaaacaggcatttccaaaaaaaaaaaa

SEQ ID NO: 38 - DNA, 964 bp, Homo sapiens
gagtgccgtagcgcccggctcctgcagacgctcggcctccgctcattcctgaccccgcagtgggcgcgatggcggaggctgtactgagggtcgcccggcggcagctgagccagcgcggcgggtctggagcccccatcctcctgcggcagatgttcgagcctgtgagctgcaccttcacgtacctgctgggtgacggagagtcccgggaggccgttctgatcgacccagtcctggaaacagcgcctcgggatgcccagctgatcaaggagctggggctgcggctgctctatgctgtgaatacccactgccacgcggaccacattacaggctcggggctgctccgttccctcctccctggctgccagtctgtcatctcccgccttagtggggcccaggctgacttacacattgaggatggagactccatccgcttcgggcgcttcgcgttggagaccagggccagccctggccacaccccaggctgtgtcaccttcgtcctgaatgaccacagcatggccttcactggagatgccctgttgatccgtgggtgtgggcggacagacttccagcaaggctgtgccaagaccttgtaccactcggtccatgaaaagatcttcacacttccaggagactgtctgatctaccctgctcacgattaccatgggttcacagtgtccaccgtggaggaggagaggactctgaaccctcggctcaccctcagctgtgaggagtttgtcaaaatcatgggcaacctgaacttgcctaaacctcagcagatagactttgctgttccagccaacatgcgctgtggggtgcagacacccactgcctgatctcacttctgtcagatgctcccatccactattaatgcactaggtgggaggagagggcggcaatgacactgcacctctcctttcccaccgcattccctggagctccctaaataaaactttttttaacgtga

SEQ ID NO: 39 - DNA, 3384 bp, Homo sapiens
atggcccccggggagaagatcaaagccaaaatcaagaagaatctgcccgtgacgggccctcaggcgccgaccattaaagagctgatgcggtggtactgcctcaacaccaacacccatggctgtcgccgcatcgtggtgtcccgcggccgtctgcgccgcctcctctggatcgggttcacactgactgccgtggccctcatcctctggcagtgcgccctcctcgtcttctccttctatactgtctcagtttccatcaaagtccacttccggaagctggattttcctgcagtcaccatctgcaacatcaacccctacaagtacagcaccgttcgccaccttctagctgacttggaacaggagaccagagaggccctgaagtccctgtatggctttccagagtcccggaagcgccgagaggcggagtcctggaactccgtctcagagggaaagcagcctagattctcccaccggattccgctgctgatctttgatcaggatgagaagggcaaggccagggacttcttcacagggaggaagcggaaagtcggcggtagcatcattcacaaggcttcaaatgtcatgcacatcgagtccaagcaagtggtgggattccaactgtgctcaaatgacacctccgactgtgccacctacaccttcagctcgggaatcaatgccattcaggagtggtataagctacactacatgaacatcatggcacaggtgcctctggagaagaaaatcaacatgagctattctgctgaggagctgctggtgacctgcttctttgatggagtgtcctgtgatgccaggaatttcacgcttttccaccacccgatgcatgggaattgctatactttcaacaacagagaaaatgagaccattctcagcacctccatggggggcagcgaatatgggctgcaagtcattttgtacataaacgaagaggaatacaacccattcctcgtgtcctccactggagctaaggtgatcatccatcggcaggatgagtatccctccgtcgaagatgtgggaacagagattgagacaacaatggtcacctctataggaatgcacctgacagagtccttcaagctgagtgagccctccagtcagtgcacggagggcgggagtgacgtgccaatcaggaacatctacaacgctgcctactcgctccagatctgccttcattcatgcttccagacaaagatggtggagaaatgtgggtgtgcccagtacagccagcctctacctcctgcagccaactactgcaactaccagcagcaccccaactggatgtattgttactaccaactgcatcgagcctttgtccaggaagagctgggctgccagtctgtgtgcaaggaagcctgccgctttaaagagtggacactaaccacaagcctggcacaatggccatctgtggtttcggagaagtggttgctgcctgttctcacttgggaccaaggccggcaagtaaacaaaaagctcaacaagacagacttggccaaactcttgatattctacaaagacctgaaccagagatccatcatggagagcccagccaacagtattgagatgcttctgtccaacttcggcggtcagctgggcctgtggatgagctgctctgttgtctgcgtcatcgagatcatcgaggtcttcttcattgacttcttctctatcattgcccgccgccagtggcagaaagccaaggagtggtgggcctggaaacaggctcccccatgtccagaagctccccgtagcccacagggccaggacaatccagccctggatatagacgatgacctacccactttcaactctgctttgcacctgcctccagccctaggaacccaagtgcccggcacaccgccccccaaatacaataccttgcgcttggagagggccttttccaaccagctcacagatacccagatgctggatgagctctgaggcagggttgagaagacagatctagtcaggaccaccagccatggtctaaggacatggatcgggtgcccccagacgtgtgcacaggggaccctctgccccactctgggcttttcagatactctgaccaaaaagcctgctttaaaccgcaagatggggcctgggcatgcgcaggaggagccatcgggtactacgcagcaacactcacaactgtccaggctgagataaatcccgggacctgaactattagcacgtcactagagactgggagccgaggcagtggtgctggcccaagtgaaggccagagtgaggactgatgcagctctttacgggtcttgagagggaaggactcttccaaagccccaaagccgagggtttcacccacactgccagcctgggttggggcccaaggatgtgaccttgagtgtcaaggctggacagctactgccagatgccaaagataggagaaagtgccagccctgaagctggagccgcttgtgaataaactgttcttcatcattgacactggagaaaggtgtcctccatgccctcaggcagcagagaactggcccagagcccttggagtgttggtggagatcagagtgccgtggtggaggtctgggactatgtcagagtgtcctcactttggggcatgggtggctccaggagatggatttagttattcaattttgtggatgaataaattgaggcacagaaagattaagttaccggcccaaggtgacacagtgaggaggtggcagagctaggatttgaccccagacaatctgacttcatgattgtggcatccaattcgtgtctgtgcctcaatttgtgcaaacgactgtgtcactttgcttggggagggggagcatcccacccacatgccctgggcaggtgacccaagacagagctgacccctccaccaccaaaggcctgtctctcaccaacaagccaactgctcacagatgacccacttcataccacattcacatctggccacctgactccagctatcaggtattaagtcccgggcagcgataagcccccccacaacagtgtgttagctctgtcttagcaacctgataggttagcataggggctgcaaatgttgttccgccacaccaaatccctgtttttgtccatgaactaagaattttattttattttattttttattttttgtagaaataggatctcactatgttgcccaggctgttcttgaactcctggcctcaaatgatcttcccacttcagcctcccaaagtgcagggattacaggcacaagccaccgtgcccagccaagaatttttatttttgcttttaaatacccaaagaagaagattctgtgactcatggaaatgatatgagattcgaattccagtgtctataaataaagttttattggtacacagccccaaaaaaaaaaaaaaaaaaaaa

SEQ ID NO: 40 - DNA, 6280 bp, Homo sapiens
ggtgaaggacctgggcagcctcaatgggacgtttgtgaatgacatgcgcatcccggaccagaagtacgtcacgctgaagctcaacgatgtcatccgctttggctacgattccaacatgtatgtgctggagcgtgtgcagcaccgagtcccggaggaggcactcaagcatgaaaagtacaccagccagctgcaggtgagcgtgaagggtttggcgcccaagaggagcgaggcactgccggaacacacaccatactgcgaggcctcgaaccccaggccggagaagggggaccggagaccaggaacagaggcagcctcttaccgcacacccctgtatgggcagccctcctggtggggtgaggacgatggtagcacgctgcctgatgcccagcgccagggagagccctacccagagcgccccaagggacccgtgcagcaggacggggagctccacggcttccgcgcccctgctgagcctcagggctgctcgttccggcgggagcccagctacttcgagatccccacgaaggagaccccgcagccgtcgcagccccccgaggtgccggcacacgagatgcccacgaaggatgcagaggcaggtgggggcggagcggcccctgtggtgcagagccacgcctccttcaccatcgagtttgatgactgcagccctggcaagatgaagatcaaggaccatatcaccaagttttccctgcgccagcggcggcccccgggcaaggaggccacacctggcgagatggtgtcggctgagaccaaggtggccgactggctggtgcagaatgacccgagcctgctgcaccgggttggccctggggatgaccgccacagcaccaagagcgacctgcctgtccacacccgcaccctgaagggccacaagcacgaggacggcacgcagagtgactcagaggaccccctggccaaggcggcctcggccgctggggtgcccttggaggccagcggggggcaggtgcggctgcagaggcagatcaagcgggacccccaggagctactacataaccagcaggcctttgtcatcgagttcttcgacgaggacacgccccgaaagaagcgctcccagtccttcacgcacagcccgtccggggaccccaaggccgacaagcgccgtggcccaacgccggccgatagggaccgccccagtgtcccagccccagtccaggcagggggccgcagctcggggccacagagggccggctcgctcaagcgggagaagacagaggaacggctgggcagcccctcgcccgcctcccgaacccctgcccgccccttcggaagcgtggggcgccgctcccgcctggcccaggacttcatggcccagtgtctgcgggagagctccccggccgcccggcccagccccgagaaggttcctccggtgctgcccgctcccctgacaccccatgggaccagccccgtgggccccccgaccccaccgcccgcccccacggacccccagctgaccaaggcacggaaacaggaggaggatgacagcctcagtgacgcagggacatacaccatcgagaccgaggcgcaggacacggaggtggaggaggctcggaagatgatcgaccaggtctttggggtgttggagtcccctgaactctccagggcatcttcggccacctttcgcccagtcatcagaggggacagagatgagtctgatgacgggggcgtggcccagcggatggcgctactgcaggagtttgcctcccggccactgggtgcggccccccaggcggagcaccagggcctcccggtgccgggctcccctgggggtcagaagtgggtgtcccgctgggccagcctggctgacagctactcagacccgggcctcacagaggatggcctgggacgtagaggcggggagccggaggggtccctgcctgtgcgcatgcggcgacggctccctcagctgcccagtgagagggctgacagccctgcgggcccagagagcagcaggaggagtgggcctgggccaccggagctggacagtgagcagcccagccgcctcttcggccaggaggagttggatcctgacagcctcagcgatgccagtgggtcggacgggggccgaggccccgagccaggggtggagccacaggacagcagacgcaggagcccccaggaggggcccacgtggagcaggggtcggcgctcaccaagggcccccggggagccaactcccgcctctttcttcattggggaccagaatggggacgctgtgttatctaggaaactgcttgcggctccaggggatggggagggcctagggcagacagcccagcccagccccccagcacgggatggcgtctatgtcagtgccaatgggagaatggtcatccagctacggcctggacggtccccagaacccgacggccctgccccagcctttctccggcaagagagcttcactaaggagccagccagtggtcccccagcgcccggcaagcccccccacatctccagccacccgcttctacaggacctggccgctacccgggccgcacgcatggacttccactcccaggacacccacctgatcttgaaggagacggagacggccctggcggccctggaggcccgactcctctctaattctgtggatgccgagtgtgaggggggcagcaccccgaggccgccggaggacgccctgtctggggactcggacgtggacacagccagcaccgtcagcctgcgtagtggcaagagcgggcccagccccacaaccccccagcctctgcgggcacagaaggagatgtcgccatccccgccagctgcacaggacccgggaggcaccgccctggtcagtgcccgtgagcagtcctcagagaggcagcatcacccacttggcccgacggacatgggccgtggagagccggtacggcgctcagccataaggcgtggccacaggccccgagggtccctggattggcccagtgaggagcgtggccctgtcctcgcccacctacccagctcagatgtgatggcctccaaccacgaaacccctgaggccaccggggcaggacggctaggttctcgccggaaaccagcggccccaccgccatccccagctgcccgggaggagcagagccgtagctcagccagctcccagaaggggccgcaggccttgacccgctccaacagcctgtccacccctcgccccacacgggcctcccggctgaggcgggcccggctgggggacgcttcagacactgaggctgcggatggtgagcgggggtccctgggcaaccctgagcccgtgggccggccagctgctgagcaggccaagaagctgtcacgcctggacatcctggccatgccccggaagcgggccggctccttcacagggactagtgaccccgaggcagcccctgcccgcaccagcttctctggccgcagtgtggagttgtgctgtgccagccgcaagcccaccatggccgaagcacgggctgtctccaggaaggctgccaacacagccaccaccacgggtccccgccagcccttcagcagggcccgctcgggcagtgcccgatacacctccaccactcagaccccgagggctggcagctccagccgggctcgttcccgggcccccggcccccgggacacggacgacgatgaggaggagcctgacccttatggtttcatcgtgcagacggcagagattgcggagattgccaggctgagccagacgctggtgaaggacgtggccatcctagcccaggagatccacgatgtggctggggacggtgacacactgggctcctcggagcctgcccacagcgcctccctcagcaacatgcccagcacccccgcctcgaccatctctgcccgggaggagctggtgcagcgcatccccgaggccagcctcaacttccagaaggtgccgcccggctcgctgaactctcgggactttgaccagaacatgaacgacagctgtgaggacgccctggccaacaagacgcggcctcggaaccgagaggaggtgatcttcgataacctgatgctgaacccggtgtcccagctgtcgcaggccatccgtgagaacacagagcaccttgccgagaagatgaagatcctctttcagaacacagggagagcttgggaggacctggaagccaggatcaacgccgagaacgaggtgcccatcctgaagacatctaacaaggaaatcagctccatcctgaaggaactgaggcgggtgcagaaacagctggaagttatcaatgccatcgtggaccccagtgggagcctggacctgctcacaggaaacaggagcttggccagctctgcacagccggggctggggaagggccgcgtggctgcccagagcccaccctcacccgcctcagccgaggccctgctgccagccctgcccctgaggaatttcccacagcgggccagctgtgggcctcccagcctcccggaccccaccttcctccctgatgccgagaggttcctgatctaggccccagacctggccaggccagcctccctgtgcgtgtgcgtctctgccttccgtccgccgcacacccgcctgcctggccgcaggtggttctccctgaagacccccacatgtgccatatccctgtgggcgggtgcctcccacgcccttgccccctcgtcagctcccagccagcaccctactcaccctgtccagccccatggccacccccacccctgcctcgccccctacaggcctctgggcccagctcctggccaggctgctgccaaggtcaagccctcaagggcattaccccgcctcctcttcatcactgttatttttgtctttagctttaaaggaaagagttgttggtgccattgcaggtgccccctccaggcctgactggctccgccaggcactaacctgccataaccctttgtgctggcctgcggccaggcagaggaagagaggtcgactgtggggtcatttggtgccaaacatggaggtgggcaggctcacctgttcctgggactgtctgagatggcagggcacttgccctggtggctcccacctgaccccaggccttttataggcaggagccccactgcttccagcctctggtgccaacacagttgccaaacccattgagcttggggctgccccgtggaggcctcctgggtatggaccaggggcttgttgagagctgagccatgcacacaggtgcagacaccccccaactcccatgcacacggctagtccaggcgcctccacgctgcaccgtgaggactgcagggcatgtccccgtgaggggctatgggcctctgtaggtgggcttccaaggtcctgggtgcagccgggtgcatggcagcccttctggcgggggtgagcgcacgaccaaagtcactggaagccgggtttccggaagctcgcagcttggcctgcaccacacgccctccccttttggcttcacgccatcaggcctcaagtgggcatgggggcagggacgggcccaggaactgttgttttctcaggattctttcagctgggaacatggcaggtgagcagagcttggtgcctctgccgtggcccctgctggggcagcccgtgttgccggagcctctaagccaaagagcccgttggccgtggttggtgggggtggacgtgggggtgtcccacctggaccagactggcgtgggtgagctccacaccctgcctggcaatggtatgagagtcggacctggacagggccagctgctgggggagcggcactggggactggaggctggaagcgggtggtgtgtgtcccctgtttacttttagctgagctggggttgggtgtacgggttctgttcctctgagccctgcggcccacctgatgtttacgtgtgtgtgtgagggggggcgggggtggcaggtgtccccccctggtccccgccccaagagcctgctgtctgtatggaggaggtgctagcccggtccaccgggctgctgcccacccctgcatgccccagttgcccaccccgcctgcccctggacatgaagtggtcacgcttcatccacggctccttcccacccctcggcagtggctgtgcaatgttttaagttcacaagttcctgctcctccccacactgagctcctttgttcctccccctccagcctttgcctgggaactggtccttgtttgccgggcttctcggagggttcactgtacattcgttctcaggtggtcttgtggctgtctttcggaaaatggttattttatatgatttgtcatggaatttgttctaataaatcattcttctatc

SEQ ID NO: 41 - DNA, 2782 bp, Homo sapiens
gcgacgccgagtttcactctggctgccttctcctgagagtcggagccacagccagagccctgcccaggccgagccggagctgcagcccgagcgcggtggtgccctcagccccgtcctcttgtcctcctcagcctcggtgccttggaatttgtgtcgctgagtcagcaagcctttcagatttgcccggtttttgttgtttgtggtttgtatcaagatgggaactcaaacaagtcattcctcctaaggagctggtgtcttcatccagaagggacagtttgtgccagctctccagagagaaaaggatctggtactgttctggagtggcctgtagcagacactgaaccaccagccagctgcatttgttgtcctggaagtcattgccaactctgccagtcacactggggtccccaaagaagtcaagatctgccggaggcgctgggcaatgaccccgggactccaggccagaggggtctgaagctgtttgggaaagcagcgggactccttgggaagatggccatggccccaagcccttccctggtgcaggtgtacaccagccccgcggctgtggccgtgtgggaatggcaggacgggctgggcacctggcacccctacagtgccaccgtctgcagcttcatcgagcagcagtttgtccagcagaagggccaacgttttgggcttgggagcctggcccacagcatccccttgggccaggcagacccctcgctggccccttacattattgacctccccagctggacccagttccgccaggacaccggcaccatgcgggctgtgcggagacacctgttcccccagcactcagcccctggccgaggtgtcgtctgggagtggctgagcgacgatggctcctggactgcctatgaagccagcgtctgtgactatctggagcagcaggtggccaggggcaaccagctcgtggacttggcccccctggggtacaactacactgtcaactacaccacccacacgcagaccaacaagacttccagcttttgccgcagcgtgcggcgccaagcagggccgccttacccggtgaccaccatcatcgctccgccgggccacacaggcgtcgcctgctcttgccaccagtgcctcagtggcagcagaactggccccgtgtcaggccgctaccgccactccatgaccaacctccctgcataccccgtcccccagcaccccccacacaggaccgcttctgtgtttgggacccaccaggcctttgcaccgtacaacaaaccctcactctccggggcccggtctgcgcccaggctgaacaccaccaacgcctggggcgcagctcctccttccctggggagccagcccctctaccgctccagcctctcccacctgggaccgcagcacctgcccccaggatcctccacctccggtgcagtcagtgcctccctccccagcggtccctcaagcagcccagggagcgtccctgccactgtgcccatgcagatgccaaagcccagcagagtccagcaggcgctcgcaggcatgacgagtgttctgatgtcagccattggactccctgtgtgtcttagccgcgcaccccagcccaccagccctcccgcctcccgtctggcttccaaaagtcacggctcagttaagagattgaggaaaatgtccgtgaaaggagcgaccccgaagccagagccagagccagagcaggtcataaaaaactacacggaagagctgaaagtgcccccagatgaggactgcatcatctgcatggagaagctgtccgcagcgtctggatacagcgatgtgactgacagcaaggcaatcgggtccctagctgtgggccacctcaccaagtgcagccatgccttccacctgctgtgcctcctggccatgtactgcaacggcaataaggatggaagtctgcagtgtccctcctgcaaaaccatctatggagagaagacggggacccagccccagggaaagatggaggtattacggttccagatgtcgctccccggccacgaggactgcgggaccatcctcatagtttacagcattccccatggtatccagggccctgagcaccccaatcccggaaagccgttcactgccagagggtttccccgccagtgctaccttccagacaacgcccagggccgcaaggtcctagagctcctgaaggtggcctggaagaggcggctcatcttcacagtgggcacgtccagcaccacgggtgagacggacaccgtggtatggaacgagatccaccacaagacagagatggaccgcaacattacgggccacggctatcccgaccccaactacctgcagaacgtgctggctgagctggctgcccagggggtgaccgaggactgcctggagcagcagtgacctcgcaccccagcacgcccgcctctggtggccaccccgctgccccatggctggctgggtggccaggcaggaagtgcccagcccgagaggctgggaggtttgttgagggtgtggggtgtgccccacctgaagccggggctccccctgcctgcctctctctcctcctcccctctgggaattgggcagccctgggcagttgtactcatgggggcttaggatgcagctacctcagtgcgcagggcccgtctgtcctctgggggctgcttcgggcccgcggtgctcggggcctggtgtggggcgagtagagacttccccagcctggacgggcgtgggttctgggtcagcttcttttacctcaattttgtttgcaataaatgctctatagccaaaaaaaaaaaaaaaa

SEQ ID NO: 42 - DNA, 2124 bp, Homo sapiens
gctccgcaatcatcttctttaccctggagctgctgctgctgctgctgcttttgcttttggggctgagtttaataagcgagcgagcgagcaagcgagcgcggggggaaaaaggcagagaatgtccgccatctaccctccgctcctgggcgcgctctcattcatagcagcctcttcatgaattacagctgagggggggcggaggaggggggggtaccacacaacaccccagcaaacctccgggcccccaggcatggctagctcgtgtgccgtgcaggtgaagctggagctggggcaccgcgcccaggtgaggaaaaaacccaccgtggagggcttcacccacgactggatggtgttcgtacgcggtccggagcacagtaacatacagcactttgtggagaaagtcgtcttccacttgcacgaaagctttcctaggccaaaaagagtgtgcaaagatccaccttacaaagtagaagaatctgggtatgctggtttcattttgccaattgaagtttattttaaaaacaaggaagaacctaggaaagtccgctttgattatgacttattcctgcatcttgaaggccatccaccagtgaatcacctccgctgtgaaaagctaactttcaacaaccccacagaggactttaggagaaagttgctgaaggcaggaggggaccctaataggagtattcataccagcagcagcagcagcagcagcagtagcagcagcagcagcagcagcagcagcagcagtagcagcagcagcagcggcagcagcagcagcagtagcagcagcagtagcagcagcagcagcagcagtagtaccagtttttcaaagcctcacaaattaatgaaggagcacaaggaaaaaccttctaaagactccagagaacataaaagtgccttcaaagaaccttccagggatcacaacaaatcttccaaagaatcctctaagaaacccaaagaaaataaaccactgaaagaagagaaaatagttcctaagatggccttcaaggaacctaaacccatgtcaaaagagccaaaaccagatagtaacttactcaccatcaccagtggacaagataagaaggctcctagtaaaaggccgcccatttcagattctgaagaactctcagccaaaaaaaggaaaaagagtagctcagaggctttatttaaaagtttttctagcgcaccaccactgatactcacttgttctgctgacaaaaaacagataaaagataaatctcatgtcaagatgggaaaggtcaaaattgaaagtgagacatcagagaagaagaaatcaacgttaccgccatttgatgatattgtggatcccaatgattcagatgtggaggagaatatatcctctaaatctgattctgaacaacccagtcctgccagctccagctccagctccagctccagcttcacaccatcccagaccaggcaacaaggtcctttgaggtctataatgaaagatctgcattctgatgacaatgaggaggaatcagatgaagtggaggataacgacaatgactctgaaatggagaggcctgtaaatagaggaggcagccgaagtcgcagagttagcttaagtgatggcagcgatagtgaaagcagttctgcttcttcacccctacatcacgaacctccaccacccttactaaaaaccaacaacaaccagattcttgaagtgaaaagtccaataaagcaaagcaaatcagataagcaaataaagaatggtgaatgtgacaaggcatacctagatgaactggtagagcttcacagaaggttaatgacattgagagaaagacacattctgcagcagatcgtgaaccttatagaagaaactggacactttcatatcacaaacacaacatttgattttgatctttgctcgctggacaaaaccacagtccgtaaactacagagttacctggaaacatctggaacatcctgaggatataacaactggatgcatcaagaactattgtgttttttttttttggtttttttttttttttggttgtgattttttgttcttgttgtttatatgaaaacactcaaaatgatgcaaccaaaagggaaaaaataaaaatcaaacaacctccaaaaaaaaaaaaaaaa

SEQ ID NO: 43 - DNA, 1539 bp, Homo sapiens
gaattcggggggagggggcagtgtcctccgagccaggacaggcatgttgttgggactggcggccatggagctgaaggtgtgggtggatggcatccagcgtgtggtctgtggggtctcagagcagaccacctgccaggaagtggtcatcgcactagcccaagcaataggccagactggccgctttgtgcttgtgcagcggcttcgggagaaggagcggcagttgctgccacaagagtgtccagtgggcgcccaggccacctgcggacagtttgccagcgatgtccagtttgtcctgaggcgcacagggcccagcctagctgggaggccctcctcagacagctgtccacccccggaacgctgcctaattcgtgccagcctccctgtaaagccacgggctgcgctgggctgtgagccccgcaaaacactgacccccgagccagcccccagcctctcacgccctgggcctgcggcccctgtgacacccacaccaggctgctgcacagacctgcggggcctggagctcagggtgcagaggaatgctgaggagctgggccatgaggccttctgggagcaagagctgcgccgggagcaggcccgggagcgagagggacaggcacgcctgcaggcactaagtgcggccactgctgagcatgccgcccggctgcaggccctggacgctcaggcccgtgccctggaggctgagctgcagctggcagcggaggcccctgggcccccctcacctatggcatctgccactgagcgcctgcaccaggacctggctgttcaggagcggcagagtgcggaggtgcagggcagcctggctctggtgagccgggccctggaggcagcagagcgagccttgcaggctcaggctcaggagctggaggagctgaaccgagagctccgtcagtgcaacctgcagcagttcatccagcagaccggggctgcgctgccaccgcccccacggcctgacaggggccctcctggcactcagggccctctgcctccagccagagaggagtccctcctgggcgctccctctgagtcccatgctggtgcccagcctaggccccgaggtggcccccatgacgcagaactcctggaggtagcagcagctcctgccccagagtggtgtcctctggcagcccagccccaggctctgtgacagcctagtgagggctgcaagaccatcctgcccggaccacagaaggagagttggcggtcacagagggctcctctgccaggcagtgggaagccctgggtttggcctcaggagctgggggtgcagtgggggactgccctagtccttgccaggtcgcccagcaccctggagaagcatggggcgtagccagctcggaacttgccaggccccaaaggccacgactgcctgttggggacaggagatgcatggacagtgtgctcaagctgtgggcatgtgcttgcctgcgggagaggtccttcactgtgtgtacacagcaagagcatgtgtgtgccacttcccctaccccaacgtgaaaacctcaataaactgcccgaagc

SEQ ID NO: 44 - DNA, 1514 bp, Homo sapiens
cgcgcctgcctctttctgagcggcatgaagccacctcccaggcggcgagcggccccggcgcgctatctgggcgaggtgaccggtcccgcgacctggagcgctcgcgagaagcggcagctagtgcgactcctgcaggcgcggcagggccagccggagccggacgccaccgagctggcccgggagctgcggggccggagcgaggctgagatccgggtcttcctccagcagctcaagggccgcgtagcccgggaggccattcagaaagtgcatccgggtggccttcagggaccaaggcgccgggaggcacagcccccagcccccatagaggtctggacggatctggctgagaagataacagggccactggaagaagccctggcagtggctttctcgcaggtgctcaccatcgcggccacggaaccggtcaccctcctgcactccaagccccccaagcccacgcaggcccgtggaaagcctttgctcctgagcgcccctggaggacaggaagaccccgcccctgaaatacctagctctgcccctgctgcacctagctccgcacccaggactcctgaccctgcccctgagaaaccttctgagtcgtcggctggtccctccactgaagaagactttgctgtggactttgagaagatctacaagtacttgtcctctgtctcccgaagtggccgcagccccgagctctcagcagctgagtccgctgtggtcctcgacctgctcatgtcacttccagaggagctgccactcctgccctgcacagccctggttgagcatatgacggagacgtacctacgcctgacagccccccagcccattcccgctggagggagcctggggcctgcagcagaaggggatggggctggctccaaggcaccagaggagacccccccagccaccgagaaggccgagcacagcgaactgaaatcgccttggcaagcagctgggatctgtcccctgaacccgttcctggtgcccctggagcttctgggtcgggcagccacccctgccaggtgaggggcatggcgggcaggaggccacaccaggccccccgccctgcccctcggttctgctcggctggccctggctctttctgaggatcccgtcatgggggaaggtccttgagatgatgctcagctgtggggcgggcctctaagatgccccatactttgggggtctcagaaatggaacccccgttgtacaggggttgggtgggggttgcaggactccactcacaagcctcctgatgtcaaggacaggcggacagggctggcctcccccagtccccaagccccactgtgccttgttgtctgctggggggccatagctggcactgcccaccgtaaaggccctcgcacattttcccccttcctgtacacctcggggccagcatcctcaccttcttcaactgaccagtcgtggttactccctgctgccaggtccttccccttcccgggggtattctgtgaccatgaataaagttaccattctctttctctttc

SEQ ID NO: 45 - DNA, 2744 bp, Homo sapiens
ctcgtgccgaattcggcacgagaccgcgtgttcgcgcctggtagagatttctcgaagacaccagtgggcccgtgtggaaccaaacctgcgcgcgtggccgggccgtgggacaacgaggccgcggagacgaaggcgcaatggcgaggaagttatctgtaatcttgatcctgacctttgccctctctgtcacaaatccccttcatgaactaaaagcagctgctttcccccagaccactgagaaaattagtccgaattgggaatctggcattaatgttgacttggcaatttccacacggcaatatcatctacaacagcttttctaccgctatggagaaaataattctttgtcagttgaagggttcagaaaattacttcaaaatataggcatagataagattaaaagaatccatatacaccatgaccacgaccatcactcagaccacgagcatcactcagaccatgagcgtcactcagaccatgagcatcactcagaccacgagcatcactctgaccataatcatgctgcttctggtaaaaataagcgaaaagctctttgcccagaccatgactcagatagttcaggtaaagatcctagaaacagccaggggaaaggagctcaccgaccagaacatgccagtggtagaaggaatgtcaaggacagtgttagtgctagtgaagtgacctcaactgtgtacaacactgtctctgaaggaactcactttctagagacaatagagactccaagacctggaaaactcttccccaaagatgtaagcagctccactccacccagtgtcacatcaaagagccgggtgagccggctggctggtaggaaaacaaatgaatctgtgagtgagccccgaaaaggctttatgtattccagaaacacaaatgaaaatcctcaggagtgtttcaatgcatcaaagctactgacatctcatggcatgggcatccaggttccgctgaatgcaacagagttcaactatctctgtccagccatcatcaaccaaattgatgctagatcttgtctgattcatacaagtgaaaagaaggctgaaatccctccaaagacctattcattacaaatagcctgggttggtggttttatagccatttccatcatcagtttcctgtctctgctgggggttatcttagtgcctctcatgaatcgggtgtttttcaaatttctcctgagtttccttgtggcactggccgttgggactttgagtggtgatgcttttttacaccttcttccacattctcatgcaagtcaccaccatagtcatagccatgaagaaccagcaatggaaatgaaaagaggaccacttttcagtcatctgtcttctcaaaacatagaagaaagtgcctattttgattccacgtggaagggtctaacagctctaggaggcctgtatttcatgtttcttgttgaacatgtcctcacattgatcaaacaatttaaagataagaagaaaaagaatcagaagaaacctgaaaatgatgatgatgtggagattaagaagcagttgtccaagtatgaatctcaactttcaacaaatgaggagaaagtagatacagatgatcgaactgaaggctatttacgagcagactcacaagagccctcccactttgattctcagcagcctgcagtcttggaagaagaagaggtcatgatagctcatgctcatccacaggaagtctacaatgaatatgtacccagagggtgcaagaataaatgccattcacatttccacgatacactcggccagtcagacgatctcattcaccaccatcatgactaccatcatattctccatcatcaccaccaccaaaaccaccatcctcacagtcacagccagcgctactctcgggaggagctgaaagatgccggcgtcgccactttggcctggatggtgataatgggtgatggcctgcacaatttcagcgatggcctagcaattggtgctgcttttactgaaggcttatcaagtggtttaagtacttctgttgctgtgttctgtcatgagttgcctcatgaattaggtgactttgctgttctactaaaggctggcatgaccgttaagcaggctgtcctttataatgcattgtcagccatgctggcgtatcttggaatggcaacaggaattttcattggtcattatgctgaaaatgtttctatgtggatatttgcacttactgctggcttattcatgtatgttgctctggttgatatggtacctgaaatgctgcacaatgatgctagtgaccatggatgtagccgctgggggtatttctttttacagaatgctgggatgcttttgggttttggaattatgttacttatttccatatttgaacataaaatcgtgtttcgtataaatttctagttaaggtttaaatgctagagtagcttaaaaagttgtcatagtttcagtaggtcatagggagatgagtttgtatgctgtactatgcagcgtttaaagttagtgggttttgtgatttttgtattgaatattgctgtctgttacaaagtcagttaaaggtacgttttaatatttaagttattctatcttggagataaaatctgtatgtgcaattcaccggtattaccagtttattatgtaaacaagagatttggcatgacatgttctgtatgtttcagggaaaaatgtctttaatgctttttcaagaactaacacagttattcctatactggattttaggtctctgaagaactgctggtg

SEQ ID NO: 46 - DNA, 1759 bp, Homo sapiens
agcggatgctggggctgtaaggcgcgcgcggtcagctgttggcggtgcagggaggaggacgccggggctcgccttccctcctctgccgccgctgccgccatgattccggtgtcgctggtggtggtggtggtgggtggctggactgtcgtctacctgaccgacttggtgctgaagtcatctgtctattttaaacattcttatgaagactggctggaaaacaacggactgagcatctcccctttccacataagatggcaaactgctgttttcaatcgtgccttttacagttggggacggcggaaagcaaggatgctttaccaatggttcaattttggaatggtgtttggcgtaattgccatgtttagctcattttttctccttggaaaaacgctgatgcagactttggcacaaatgatggctgactctccctcttcttattcttcctcctcttcttcctcttcctcctcttcttcctcttcctcttcttcatcttcttcctcttcctcgcttcacaatgaacaggtgttacaagttgtggttcctggtataaatttacccgtcaatcaactgacctatttcttcacggcagttctcattagtggtgttgtacatgaaattggacatgggatagcagctattagggaacaagttcgatttaatggctttgggatttttctcttcattatttatcctggagcatttgttgatctgttcaccactcatttgcaacttatatcgccagtccagcagctaaggatattttgtgcaggtatctggcataattttgtccttgcactcttgggtattttagctcttgttctcctcccagtaattctcttgccattttactacactggagttggggtgctcatcactgaagttgctgaggactctcctgccattggacccagaggcctttttgtgggagaccttgtcacccatctacaggattgtcctgttactaatgtgcaagattggaatgaatgtttagataccatcgcctatgagccccaaattggttactgtataagtgcatcaactttacagcagttaagtttcccagttagagcatacaaacgactagatggttcaactgaatgctgtaacaatcacagcctcacagatgtgtgcttttcctacagaaataattttaataagcgtttgcatacatgtcttcctgcccggaaagcagttgaagcaactcaagtttgcagaaccaataaagactgtaaaaaaagctcaagttcaagtttctgtataataccttctttggaaactcacactcgcttaataaaagtaaaacacccacctcagattgatatgttatacgtaggacatcctctgcatcttcactacacagtgagcatcaccagttttatcccacgttttaactttctaagcatagatctgccagtggttgtggagacatttgtcaagtacctgatttccctctcaggagctctggctattgttaatgcagtaccctgctttgctttggatggacaatggattctaaactctttcttggatgccacccttacctcagtgattggagacaatgatgtcaaagatctaatagggtttttcatcttgctgggtggcagtgtacttttggctgccaatgtgaccctgggactctggatggttacagcacggtaatgtttgcactcatctgacagaatccctgagttacagtatacagctatgtggtaatattcattgccattgaaattcttacttggtatgaaatataaagtgt

SEQ ID NO: 47 - DNA, 1759 bp, Homo sapiens; identical to SEQ ID NO: 46

SEQ ID NO: 48 - DNA, 1610 bp, Homo sapiens
ggcacgaggctgcggccgcagtagccggagccggagccgcagccaccggtgccttcctttcccgccgccgcccagccgccgtccggcctccctcgggcccgagcgcagaccaggctccagccgcgcggcgccggcagcctcgcgctccctctcgggtctctctcgggcctcgggcaccgcgtcctgtgggcggccgcctgcctgcccgcccgcccgcagccccttgcctgccggcccctgggcggcccgtgccatgggcaccgacagccgcgcggccaaggcgctcctggcgcgggcccgcaccctgcacctgcagacggggaacctgctgaactggggccgcctgcggaagaagtgcccgtccacgcacagcgaggagcttcatgattgtatccaaaaaaccttgaatgaatggagttcccaaatcaacccagatttggtcagggagtttccagatgtcttggaatgcactgtatctcatgcagtagaaaagataaatcctgatgaaagagaagaaatgaaagtttctgcaaaactgttcattgtagaatcaaactcttcatcatcaactagaagtgcagttgacatggcctgttcagtccttggagttgcacagctggattctgtgatcattgcttcacctcctattgaagatggagttaatctttccttggagcatttacagccttactgggaggaattagaaaacttagttcagagcaaaaagattgttgccataggtacctctgatctagacaaaacacagttggaacagctgtatcagtgggcacaggtaaaaccaaatagtaaccaagttaatcttgcctcctgctgtgtgatgccaccagatttgactgcatttgctaaacaatttgacatacagctgttgactcacaatgatccaaaagaactgctttctgaagcaagtttccaagaagctcttcaggaaagcattcctgacattcaagcgcacgagtgggtgccgctgtggctactgcggtattcggtcattgtgaaaagtagaggaattatcaaatcaaaaggctacattttacaagctaaaagaaggggttcttaactgacttaggagcataacttacctgtaatttccttcaatatgagagaaaattgagatgtgtaaaatctagttactgcctgtaaatggtgtcattgaggcagatattctttcgtcatatttgacagtatgttgtctgtcaagttttaaatacttatcttgcctccatatcaatccattctcatgaacctctgtattgctttccttaaactattgttttctaattgaaattgtctataaagaaaatacttgcaatatatttttcctttatttttatgactaatataaatcaagaaaatttgttgttagatatattttggcctaggtatcagggtaatgtatatacatattttttatttccaaaaaaaattcattaattgcttcttaactcttattataaccaagcaatttaattacaattgttaaaactgaaatactggaagaagatatttttcctgtcattgatgagatatatcagagtaactggagtagctgggatttactagtagtgtaaataaaattcactcttcaatac

SEQ ID NO: 49 - DNA, 2044 bp, Homo sapiens; identical to SEQ ID NO: 32

SEQ ID NO: 50 - DNA, 2266 bp, Homo sapiens
agcggagcagtagccaccactccgccgaggccgcaaccccggctcggcctccccaggccccgccgctgccgcagtcatggctgctgatggggtggacgaacgctcgcctctgctgtcagcatcccactccggaaatgtcactcccaccgccccaccgtacttgcaagaaagcagccccagagcggagctcccacctccatatacagccattgccagtccagacgccagtggtattccagtaataaactgccgtgtgtgccaatcactaatcaatttggatggcaagcttcaccagcatgtggttaagtgcacagtttgcaatgaagctacgccaatcaaaaaccccccaacaggcaagaaatatgttagatgcccttgtaattgtcttctcatttgtaaggacacatctcggcgaataggatgcccaagacccaactgtagacggataattaaccttggcccagtaatgcttatttctgaagaacaaccagctcagcctgcattgccaatccaaccagaaggtacaagggtcgtgtgtgggcactgtggaaacacattcctgtggatggaactgaggttcaacactctggcaaaatgcccacactgcaaaaaaatctcctcagtgggtagtgcacttccacgaagacgctgctgtgcatatattaccattggaatgatatgtattttcattggagttgggttaactgttggcaccccagattttgcaaggcgatttcgagcaacctatgtttcttgggcaattgcttatctcctaggattgatctgccttatccgagcttgttattggggagccataagagtcagttatccagaacacagttttgcataagcttgtttatgattcagtaatgcaggtgagagtgtctagcagttcttggtaagctactctggacatctttaaattatttatcctaatggattccattctggtttatgtataatcgtttcaagactttgggagtcttttatgaacaaatgctcattgcactatattatatgcaaattgttttgctgctaggttttcaaaatttgaataataaagccttttcatgttcttttacatctcttatagatatttttggatttgttaccaaacattacatttactctcacccttttattatttttaaataagttatttcattacttgctgatacatgagtattcctaagtgtttataaatatttctataatagtttcacatttatatttacattttaattaaacagtatcaaaattgcttgcttaaaacctaagcaatatgcattttgcttgaactgcttactgtaactttaacctaagattatagtgaccttattcaggaaaaaaaaaaaatttagtgtaacttcaaagacttgacattcttgtcagaggaaaaaaaatttctagatactgtttgcttgttttttgttgtttgtagaaagataaaatattttggtaataatttaaaatacaagaacgaatatttatttgtccacagttggagatgttggataaatgtcttttctcaaagatcacaggacttttgtctttcatttttgcctttttatttaccatttataaaagatctggtctggattatggaatttaatgtttatcagctctatgtattcctttatagaggcttgaggaagtatttcacataacatgttttataatacttaaccatttatccaaagatatatttacattgggttgtgcccctttcccttagatcatggtaaatttttcttattgaggtaattatgtactacttatatttgaaggaagcttatgacattttacagtagctaaaatgttgagattagaggtacttttactattcttctcaaaggtaactgatcagataattacccaaattattcaagaaaatagatcagaaataaagaacaacataattttctaagaattcattgaaatttatggaatcagctctcgcactgcccatctttgcagttttgaaaaagaaattgcttaatcacaaatgttctacagtctttaaatgtagtagaattagacagtgagatcatctgagtaaattgattggtgattccagagataagactaatattttaaattatttatgatactgattagtataaaaacgtactcatcacagaatttgaagcaaaatacatgtacacttcaaagagtaaatgacaaatgtataaatgctgtagctcaggattatatgtacctttaaaaatacactaataaagattattgttcaaaaaaaaaaaaaaaa

SEQ ID NO: 51 - DNA, 3142 bp, Homo sapiens
gtggccgctgccgcctctgcctgggtcccttcggccgtacctctgcgtgggggctgcctccccggctcccggtgcagacaccatgtacggatttgtgaatcacgccctggagttgctggtgatccgcaattacggccccgaggtgtgggaagacatcaaaaaagaggcacagttagatgaagaaggacagtttcttgtcagaataatatatgatgactccaaaacttatgatttggttgctgctgcaagcaaagtcctcaatctcaatgctggagaaatcctccaaatgtttgggaagatgtttttcgtcttttgccaagaatctggttatgatacaatcttgcgtgtcctgggctctaatgtcagagaatttctacagaaccttgatgctctgcacgaccaccttgctaccatctacccaggaatgcgtgcaccttcctttaggtgcactgatgcagaaaagggcaaaggactcattttgcactactactcagagagagaaggacttcaggatattgtcattggaatcatcaaaacagtggcacaacaaatccatggcactgaaatagacatgaaggttattcagcaaagaaatgaagaatgtgatcatactcaatttttaattgaagaaaaagagtcaaaagaagaggatttttatgaagatcttgacagatttgaagaaaatggtacccaggaatcacgcatcagcccatatacattctgcaaagcttttccttttcatataatatttgaccgggacctagtggtcactcagtgtggcaatgctatatacagagttctcccccagctccagcctgggaattgcagccttctgtctgtcttctcgctggttcgtcctcatattgatattagtttccatgggatcctttctcacatcaatactgtttttgtattgagaagcaaggaaggattgttggatgtggagaaattagaatgtgaggatgaactgactgggactgagatcagctgcttacgtctcaagggtcaaatgatctacttacctgaagcagatagcatactttttctatgttcaccaagtgtcatgaacctggacgatttgacaaggagagggctgtatctaagtgacatccctctgcatgatgccacacgcgatcttgttcttttgggagaacaatttagagaggaatacaaactcacccaagaactggaaatcctcactgacaggctacagctcacgttaagagccctggaagatgaaaagaaaaagacagacacattgctgtattctgtccttcctccgtctgttgccaatgagctgcggcacaagcgtccagtgcctgccaaaagatatgacaatgtgaccatcctctttagtggcattgtgggcttcaatgctttctgtagcaagcatgcatctggagaaggagccatgaagatcgtcaacctcctcaacgacctctacaccagatttgacacactgactgattcccggaaaaacccatttgtttataaggtggagactgttggtgacaagtatatgacagtgagtggtttaccagagccatgcattcaccatgcacgatccatctgccacctggccttggacatgatggaaattgctggccaggttcaagtagatggtgaatctgttcagataacaatagggatacacactggagaggtagttacaggtgtcataggacagcggatgcctcgatactgtctttttgggaatactgtcaacctcacaagccgaacagaaaccacaggagaaaagggaaaaataaatgtgtctgaatatacatacagatgtcttatgtctccagaaaattcagatccacaattccacttggagcacagaggcccagtgtccatgaagggcaaaaaagaaccaatgcaagtttggtttctatccagaaaaaatacaggaacagaggaaacaaagcaggatgatgactgaatcttggattgtggggtgaagaggagtacagactaggttccagttttctcctaacacgtgccaagcccaggagcagttcttccctatggatacagattttcttttgtccttgtccattaccccaagactttcttctagatatatctctcactatccgttattcaaccttagctctgctttctattactttttaggctttagtatattatctaaagtttggcttttgatgtggatgatgtgagcttcatgtgtcttaaaatctactacaagcattacctaacatggtgatctgcaagtagtaggcacccaataaatatttgttgaatttagttaaatgaaactgaacagtgtttggccatgtgtatatttatatcatgtttaccaaatctgtttagtgttccacatatatgtatatgtatattttaatgactataatgtaataaagtttatatcatgttggtgtatatcattatagaaatcattttctaaaggagtgaattctaagttttaggggaaaaaatgcaatttattttcagactcccaaagtaagaattaacatatcatgctaagaaaatagtgactattttgaagtatgctacttccctttcagaaatatagaatacacgtttctgttattaaagtatttgattactaattcaaatcatatggcaattataattcttctaaaatgctatcatttgtaactgtatcccctgtattaaatctcattaaccacaggcagctgttacagaaagctgcattgtttcacattgagctgttacattagttcaggctaaatgttgggcgctccaaccacatccaagaataaatctggaaacacactgctgggatactgctgttagagcccttcttggccttgtattcccagaaatgagctccctttccttagcttagaagaatgtgattatatccaggacatcatgttcagaaaacttagtttactttcagcatagaatgcattactgttggaataattggcctctagctcttaaatgtctctgataacttattaatatctatctttataaaatagagtgcaactacttttgtgtaaaaatgtttgcctttaaatttagtatttcatatcagcacatcgatatatgtataaatgttccatgttaatgtgtaaaagagtctgtaataaattatttttttcacgtgtcaaaaaaaaaaaaaaaa

SEQ ID NO: 52 - DNA, 5537 bp, Homo sapiens
ggaactgccgcggccgccaccgccgctgccggcgccgctgctgtaggggaccagcgcgggtgcgcagacgaaaggcgctctttgccagctgaaagttcccacggaaaaactaccatctcccctgcccaccatggcagacgaaattgatttcactactggagatgccggggcttccagcacttaccctatgcagtgctcggccttgcgcaaaaacggcttcgtggtgctcaaaggacgaccatgcaaaatagtggagatgtcaacttccaaaactggaaagcatggtcatgccaaggttcaccttgttggaattgatattttcacgggcaaaaaatatgaagatatttgtccttctactcacaacatggatgttccaaatattaagagaaatgattatcaactgatatgcattcaagatggttacctttccctgctgacagaaactggtgaagttcgtgaggatcttaaactgccagaaggtgaactaggcaaagaaatagagggaaaatacaatgcaggtgaagatgtacaggtgtctgtcatgtgtgcaatgagtgaagaatatgctgtagccataaaaccctgcaaataaacggaaacatcaggcatgaacactgtttatgtctgaatcaactgcagatctaatttggttctaagttgtcaccaaagctatagccttcataagcaacctcatttctttttttaattgttttcagattgtgctgggttagttttgcaagcaattgataatttttaaaaaattatcaatatgtataattttttttgaattttgtagatatgtttcctataatattcctgtggttttcagtatgtcagtccaagaaacaaacaagatagcttcagcagatgtgatttgtctgagcaaatcattcctgtgttttagttagatgataaaccagggttttaaatcaaacaatgtagcataaagtggtattgaagtaccatatttaagttgaactgctctgcattaattacagatttaatataaaatgaactgattatatattggaattgttgcactttcagcctgtgtagggcaaacacaaatccttaaacaaaaatcatgttatcaaaaactgtcagttattttggtggccacatgcaaccatgtgattactttggtcatactatttaccaaattgttggcaaacttgatgtaaccttatatggtggttttagtcccttcttatggttggcagaagggcactgaactgttgggtgaaagttagttagcaagtaagattataaggaagacacaaaagacagtggcaaagagggttgattaaatctataagtttttatgtgaggactttgtaagtcagcataaaaatgaaaagttgtttctcagttgtttttgcttttaactttgcccccaacgtttaaagggagtgatctgctttacatgatactatgcaatgcttgttttccaactatgttgaataaatagtaatatttatcagtaaatactcctttccaacttccttttttttttttttttttttgagactgagtctcactccatcagccaggctggagtgcagtggtgcaatctcggctcactgcaacctctgcctcccgagttcaagcaattctcctgcctcagcctcccaagtagctgggactacaggtgcatgccaccacgcccagctacttttttgtgtattttagtagagatggggtttcaccatgttgtctaggctggtcttgaactcctgacctcaggtgatccacctgcctcagcctcccaaagtgctgggattacaggcatgagccaccacacccagcccctttccaaccatttctaagtagattttttgacattaatgtatttattaaacaaaaactgagaattccttaaattgatttggaatttttgttaattttatgtcctttttttcctaaagtgaattaaagtgaatcatggaagcagcattactttatatgaatattattatttaagttaagttattttaagtatatgcattttttctgattgttgtgtgacttaattcagttgctggtgtgaactataactagcaaataattctataaactgaattattttaaaaggtattttaggtgacaccactgcatttctatttcatcttttgagtcatatgtatattatttccagaattttagacattattacagggtttgtgaggacctttgactcagtgacaatcatcatattggagcaaaacatagaacaaaatcactatctcagaaataccttaattctctaagactggctcttagacctctcccatcatgccttgacctctaaaaagccctttgttcctatcttctaaaggaaagtatatcatatatgatgatgtaactgatctaatcagtgactggaaatagcattagtaacagaagatcccaagttttagttgcttaatttgtacacacttttaaatattgtcttagcctcggcaaaccaatttggggaagaagcaagatactttaagagaaatacaaaggaaatttctaaagcacaagaaatagtgaggtagtagttagtcgtctttcctacaacattttagcttttgcccatctaaagcacaattaaaattaggctacattctttccagtattctatttaagtacctactacatactgctctagtttcttagtactctgtaatgtgtatcttaattgctactggttggcattgtaactcataggaattccagaaaattattaatccgtgctgcttgcagttcattcatatggcccctcttaaccatgctggtgttatgattcagtattaactctcaattagcatgcccctgttcttcctaacttgtaaaatttcacataaatatattttcaattgtgtacaaattaagggtgtacaaattataataatgcatctctatcttcatactttgaatggcaaacgctatttatgcataaatattttcattttaagtaatatatgaagtgtaaatactcgatatataagtatagattttaaagatatgggactttattttcacataagtcaatagatgtttctctagaacaaaatatttagtaaagctttataaattatattaaaaggaagcggggaacatgtattttttaacatagaacagaagtgacttcattctttttagacatcagaaatgttaaagttgattcccaatatttgttgtacttttttgtagcaaatgttaaaaatcacgagttaccatgtatagaatgtggactgtcatgttgatatcattgtacagtgataagccatttttatctgtatacatttcaccaatttattaacaggttgaatatttgtttctttttagaacattttatttatactgtgaagactttgttataccttatttgctacaacatagatcatatcattgctactttgacttagcatttgcatcataaacataattatgatgtttttttcatgctcccttccaggggctcagtcacttgaagaaactgttgctaaccaagctcttgactctgtttcccttaatgatacaagtctctgtaccagcgctttatgttaattaccaaaactctcctgcatcagagcatgatatctataataggagatactgcaataaaatgattaggctgtaaaatttggagacacaatttttcattacaatgcaatttgcatgtgcacatgtgcgcacataactttatatgttagttcttttttccaaactcccaactcttaaaagtattgtagtctgttggtgcctcaactgttggtaactttttttttttaaatttacaactttccacaacttgtttttgtactttaaggtttctcaattagaatatttctagttgagctgtaatttgaatgcattgttctcagggctatttgtgctaaaagctgaaatttcattattttaaagctaattgcctgaaaatatattggcagaattttcccaaattgtaataactgtgatacatgcatataaaaaaatccttaatgtcaacacacttaaactacatgctaaatagtcaagaaaaaaatggaaacagtagcatccatactggaatcttgccatatttttttcattttagaatagattttggcagtctcatcttagaatcctatccttaggatacatctgaaagcattcctttggcatggaccccagagatagttttggagccaggcattgatgtagaggttcaccaaacatatttagggataatagataaattcataatgcttttttgggtacactgaaatgtttacatactgaattctgtaatatgaactaggaacgcatttactatgagaaaatatggctcttaagcagtgtaagagtgaaaatataagcatatttccattaacagtatattgtactgatcagcagctctcattttaacatcagttaggcataatatttcatagttttcaagccttttttttctgctaacattcagacaagtaacaggcaacaaagatttaagaaaaatttatggtggaaaaccttaaaaattgagacaattcaatctatttaatctattaaattttttctctgaattgggtatatggcatcattatttgattttagcagggaacatttggatttagcttatgaaacacagatgttctatgggaacatggcttgaagccaatatgtaatttaatgtttttccattaaacaaacatctgaacaccaacttagctaccaagtgaggtcaagtgcctgaaaagtactgtatacatctaataagcatgttttccttatgtaaaagatgcactttatggcaatgcataccaggctttcacctgctagaaacatacttgttgccaactttgccatctaccactattctcctccttagaacaggtagaaacctattttacaaaaaaaaaaaaaaaaaaaaaaagacaggttattgtatttatatgaagtccctaaaactgtttcttggtattgatagacttaagtttatcttagttcaagattgcactttttaaaaaactctggactattttcagcaatgaccgaacagcttgtcacacatcatagttgtgatcttttttgaggagttatttattgtggttaatatctactataaataagcattcttgtgcttgttacaaagcataatgcaaattactagttctatactagtataatgaaaatgactagttctatactgttatgtacttttgtcttcctccccaaaaaggaaacagtttagcattgtctaaattcagtggcacttttttagtaatacatttttttttcttagatacaggagaactattgcttttacctgcagaaactcaaatgttttcgctaaaactttaaaattctaaaatacgtagtatgggtattactaattgtacattttacatttcaaaaatagttaaaattcaaatgttaagtctttgacttaaaaaacctttaaatatagataataccttaacaattataactttgtgatattattaaaatatatttgtctgttaacttcatcagttgtattaaataaaaatagttaacagcttgcacta

SEQ ID NO: 53 - DNA, 1444 bp, Homo sapiens
tttcattttgggccgagctggaggcggcggggccgtcccggaacggctgcggccgggcaccccgggagttaatccgaaagcgccgcaagccccgcgggccggccgcaccgcacgtgtcaccgagaagctgatgtagagagagacacagaaggagacagaaagcaagagaccagagtcccgggaaagtcctgccgcgcctcgggacaattataaaaatgtggccccctgggtcagcctcccagccaccgccctcacctgccgcggccacaggtctgcatccagcggctcgccctgtgtccctgcagtgccggctcagcatgtgtccagcgcgcagcctcctccttgtggctaccctggtcctcctggaccacctcagtttggccagaaacctccccgtggccactccagacccaggaatgttcccatgccttcaccactcccaaaacctgctgagggccgtcagcaacatgctccagaaggccagacaaactctagaattttacccttgcacttctgaagagattgatcatgaagatatcacaaaagataaaaccagcacagtggaggcctgtttaccattggaattaaccaagaatgagagttgcctaaattccagagagacctctttcataactaatgggagttgcctggcctccagaaagacctcttttatgatggccctgtgccttagtagtatttatgaagacttgaagatgtaccaggtggagttcaagaccatgaatgcaaagcttctgatggatcctaagaggcagatctttctagatcaaaacatgctggcagttattgatgagctgatgcaggccctgaatttcaacagtgagactgtgccacaaaaatcctcccttgaagaaccggatttttataaaactaaaatcaagctctgcatacttcttcatgctttcagaattcgggcagtgactattgatagagtgatgagctatctgaatgcttcctaaaaagcgaggtccctccaaaccgttgtcatttttataaaactttgaaatgaggaaactttgataggatgtggattaagaactagggagggggaaagaaggatgggactattacatccacatgatacctctgatcaagtatttttgacatttactgtggataaattgtttttaagttttcatgaatgaattgctaagaagggaaaatatccatcctgaaggtgtttttcattcactttaatagaagggcaaatatttataagctatttctgtaccaaagtgtttgtggaaacaaacatgtaagcataacttattttaaaatatttatttatataacttggtaatcatgaaagcatctgagctaacttatatttatttatgttatatttattaaattatttatcaagtgtatttgaaaaatatttttaagtgttctaaaaataaaagtattgaattaaagtgaaaaaaaa

SEQ ID NO: 54 - DNA, 3189 bp, Homo sapiens
agcgggcgggactgccgggtgatgagatactcggtcggcgacggtagaacgggcgacggcgacaaccgcaatcacatccacgacggtgatcatggcagagaatcacgcccagaataaagccaagctcatctctgagacccggaggaggttcgaagctgagtatgtgacagataagtcagataaatatgatgcacgtgatgttgaaaggctacaacaagatgataactgggttgaaagttacttatcttggagacataatattgtagatgaaacactgaagatgctcgatgagagttttcagtggaggaaagaaatttctgtcaatgaccttaatgaatcctccattcccagatggttattggaaattggtgttatttatctccatggttatgacaaagaaggtaacaaattgttctggatcagggtgaagtatcatgtaaaagaccagaaaaccatattggacaaaaagaagctcatagcattctggttggaacgttatgctaagagggaaaatgggaaacctgtaacagtgatgtttgacctgtcagaaactggaataaatagcattgacatggactttgtacgctttatcatcaactgctttaaggtttattaccctaaatacctctcaaaaatagtgatctttgatatgccttggttaatgaatgctgctttcaaaattgtgaaaacctggcttggtccagaagcagtgagcttgttgaagtttacaagcaaaaatgaagtccaggactatgtcagtgtagaatacctgcctccccacatgggtggaactgatcctttcaagtatagctatccaccactagtagatgatgacttccagaccccactgtgtgagaatgggcctattaccagtgaggatgaaacttcaagtaaagaagacatagaaagtgatggcaaagaaacattggaaacaatttctaatgaagaacaaacacctcttcttaaaaagattaacccaaccgaatctacttccaaagcagaagaaaatgaaaaagttgattcaaaagtgaaagctttcaagaaaccattgagtgtatttaaaggccccttactacacatcagcccagcagaagaactgtactttggaagtacagaatccggagagaagaaaaccttaatagtgttgacaaatgtaactaaaaatatagtggcatttaaggtgagaacaacagctccagaaaaatacagagtcaagccaagcaatagcagctgtgacccgggtgcatcagtggatatagttgtgtctccccatgggggtttaacagtctctgcccaagaccgttttctgataatggctgcagaaatggaacagtcatctggcacaggcccagcagaattaactcagttttggaaagaagttcccagaaacaaagtgatggaacataggttaagatgccatactgttgaaagcagtaaaccaaacactcttacgttaaaagacaatgctttcaatatgtcagataaaaccagtgaagatatatgtctacaactcagtcgtttactagaaagcaataggaagcttgaagaccaagttcagcgttgtatctggttccagcagctgctgctttccttaacaatgctcttgcttgcttttgtcacctctttcttctatttattgtacagttaaagaagtggtgccgggtaggaaccacggttccttcgtccattagttggaaaaagtaacagacctaaaactctaccaagctactaaaaacattgcacatctgtgcttcctaaaaggaaatatgcagcacgtggaggggaacacatacatgtcttgaaaataaactgctagaataaagaaatgctggagaaattgattataagagactatagctatttagtaaagtaagtaaaggcatatccattgtgtaaattaatagtttaaatataatttattttttccttttgatctgaatacttttaaagcttaagttttatcgtgtaaatacattagctaaactgaaaagtataagtaacatgctttgttgcagccaaaaaatgtaatctgcttttttatgacagaattattatagctgagctgacttactagcttttctatactatgtatatagaagaacatgtatattgagaaagaaaacatacttatatagaggaatttatgtaaccatgactttgtaattttgagaattcctcccagtgatggtcagtattcttttggaatgtaaaccgatttaatgccaaaccaccttaacctttgtttctcagtgttccttaacagcctgccttttattaatctcaggtttttttatgaacactctcatttcagtagaatttggaaaactaagcgtggttggaatttctttgaattctgttagtaatgcccaaaagaaaagtctcaagcagtccccctatccagtcatttttatggagtttcatgttgtccactatagctggacactgaaccttttgcctaatttattataaaggcctgaccctctattgtcccatcttcacccccattccagagcagaggagtctctgtggaccatgaattgcactgtctccctcctcatttctaaatgaaaggtattagatataaatttttttgaaaggttagttgtttgagatgctaagcaggataataaatttagattttaaaatgttccctgtaaaagtcagcccatgacaaggaaatttacaaaatactagagtatctagaagggtgaaaacaaaaaaaaataaaaagaaacacagacgcccaggtgtcagctctccgtttaaagaatgaaaaatgtaactcatgatgatctgtgaaaccttcaaactaggaccaattgacttacttgatattctgcctttgatatggtagtacccacccggtattcctaaaatcctaaaaagatacaccttgcagtagcagaggcaatgacatgagtttgttttctcattaatatgaccagtttgggtctatgttggttcacatgtacatctactttatatgaaagaaaaaacagttgtctgcctgtaaaatgttgagtttcgattgagccatgtttggagattttattactattctgaagggtagtgttgttggttttcatcttcaagaagttgattccaaaactgagttatgaagaatgatataacagttccttcaaaattggcctaggaaataaaaccttaaaaggaaaaaaaaaaaaaaaa

SEQ ID NO: 55 - DNA, 2266 bp, Homo sapiens; identical to SEQ ID NO: 50

SEQ ID NO: 56 - DNA, 3234 bp, Homo sapiens
gtttgcatttctaatgacagtgaactgacaaagcgtgaaagtggtctaaggagcaaaacaaagccagcaagcctgcttctggtgtgccaagattaatcaatattccagaaacctcgggtttcccctcctccctgtgcggtttccattccccactcctcctttcccgggcacagactcctccctctcttcttaagttgccctgatagtaacttgcagtttcagagcacatgcacactgtcaggctagcctgcctgcttacgcgcgctgcggattgttgctccgttgtacctgctgggaattcacctcgttactgcttgatatcttccaccccttacaaaatcagaaaaggtaagtgtcacattctgtgttcctgctgggtttaatttctcctttcacttctctgccgatgtatttgccttccaagcagaggagtagcctgaatcaaggctagccattttggtagataaagtccttgttagtcatctcacgtcgtgagagtgtggtgctgtttatgccggtcgctgttaattcggagttgagtcattcggggtggattgggggcagattgtggcgcgagatctagaaaaaggatcaaggttgagcggatctgcttaaaagtgactggtaagaggaatcagagctattagtttaaaaaaaaaaaaattccttgggtccttccttcccttatttcccggtcttccacttctccctaagcatttaatccagtgtgaagtcttaaacaaattagaagtcttagtatcactgaccccaacttgcaattttatttaaaaggcaaactgttaagacaagtctttttttttcctgcactgggattgcgagaagtcatttgcgaggagtcctttggtttccagttacctccccacaggcgcacacgctggctgcttgcgttggcagcgacacacatccatggtacggctggttttcactcggattgattatgggaagggctatggattagagctcctgtaaagcaccaaggaggaatcccttgatttttcagaacagctgatttccaccaggaaagagatttactgaaatgtagttaaatagcgtgagtgctttaaagaaaccagaaaccacaagctgtaatgtttggaatgaaaattggtttcatctcatctgttctagaaatcctaaattttaaaacgctaaaaagtcagcgatagtttctcggaagattccagcatgtgtgtcacaaagaaaaacactacttcatacttctacttgtgataaacgaagctgaattgtgatttcagatgatttatagatgtgcccagagcactttgcttatttcatggaaaaaaaatgaaaaaattaccctgtaaaatagtcacatgtatttcccatgtactgtgggcacttgtgttctttttatgaccatatttactagtagatattattatattttttcttaatgaagaaaatagctggttactttactgcatgtaacagagacaactcccacctatcagtatcttaattatttttattgacctggttatgctttcaaccatgtatacagcataatttgtcaagtaatgattgaatactttctgtgcattcagttcaattggacatttactgattgtgtacgttgtgcaaggcatcagctgggttctgcgggggagggtgggaataggggttctcagtcagatctagctctgaagaacccttttatagcctcattggaaggggaaggacggatttttaaaaagaaaatagaatatattccgaatttatgcacatttctcacacgtggtccactaaaatatgcacactgcaaccttgaggtctggtattgtggctctccagtccttgattcctgctgagattatgcaatttgccaagagcttgcctggtgtggagcagcactgatttctcacccctggaggctataactcatgtctctttttctcccattctagttgtgttttctaataccaaagaggaggtttggctttctgtgggtgattcccagacactgaagtgcaaagaagagaccctcctagaaaagtaaaatatgactaaaagcaatggagaagagcccaagatggggggcaggatggagagattccagcagggagtccgtaaacgcacacttttggccaagaagaaagtgcagaacattacaaaggaggatgttaaaagttacctgtttcggaatgcttttgtgctgctcacagtcaccgctgtcattgtgggtgagtcatttgattaaaaacaaaaaaacctgtatcttgtttctctggggcatctggctgcccggggaatattatcagatgaactagttgtaggtatcaaaatggtagcctaggctttcctctgaacttgatgatttttctccataaaaatgactgttttggcttgtttggagcaatatatagtaaacacatcattaggcatcattaggcatcattaggcattatgcaaatcaattgtgtgaggaagaaaataaataaaatattttcccatttcatgtaaggataaggaagtgatcatttaatcattaggcatgacaaagcaagcatgctagatttggccaaaatgtaattatatacaatgtcagttgcacttaaaactaatttatacaattagtacacctaaaatgacatgttggttccaaatagtaattatattctaactggtgctgacttgaagctgagtatcaacgcttaggcacagagaccgaatattttatgtgtttgcactctctcacccagcaactgggaaaggtagattggggaaaatgttaacacagatctctttcattcattgctttgcagagcctgccataaccagctatacctttttttgaatcatttccatctcttactaatttagcagggttgacagcaatctgtactaataaaatattattgttttgttttgtttattgatcttaaaagttatagtttattacttatgggtggcattgatcctactttaaaatatagctgaaaaaacctacttatttggaattttgaccaaccaatacagaatccttagattgacaacatatacgccaatgccaggttgtaaatattccaacttaacctaccaatttgccaccaaaaaagaggcattcagtaccgttttaatctctactttggagtttgccaagatttccatcaactttaaagaggtaatgatttaataaagattaagaaaattctgtagtgtgtaaatataacttttttcaagaaaattgaattc

SEQ ID NO: 57 - DNA, 3331 bp, Homo sapiens
cagagggcaccgcccaggcctcggaaggtgtcagggagaactttccgtggtttcagcgtcgtcgcctggagcggcggtttagagagccgagcctgatgggcgccaaggccggctggctgcttggagcgctgcctcgaagggactgcgtaaggaagctaatccggagaacccaggccagagcctgaaatatggcgacctgcatcggggagaagatcgaggattttaaagttggaaatctgcttggtaaaggatcatttgctggtgtctacagagctgagtccattcacagtggtttggaagttgcaatcaaaatgatagataagaaagccatgtacaaagcaggaatggtacagagagtccaaaatgaggtgaaaatacattgccaattgaaacatccttctatcttggagctttataactattttgaagatagcaattatgtgtatctggtattagaaatgtgccataatggagaaatgaacaggtatctaaagaatagagtgaaacccttctcagaaaatgaagctcgacacttcatgcaccagatcatcacagggatgttgtatcttcattctcatggtatactacaccgggacctcacactttctaacctcctactgactcgtaatatgaacatcaagattgctgattttgggctggcaactcaactgaaaatgccacatgaaaagcactatacattatgtggaactcctaactacatttcaccagaaattgccactcgaagtgcacatggccttgaatctgatgtttggtccctgggctgtatgttttatacattacttatcgggagaccacccttcgacactgacacagtcaagaacacattaaataaagtagtattggcagattatgaaatgccaacttttttgtcaatagaggccaaggaccttattcaccagttacttcgtagaaatccagcagatcgtttaagtctgtcttcagtattggaccatccttttatgtcccgaaattcttcaacaaaaagtaaagatttaggaactgtggaagactcaattgatagtgggcatgccacaatttctactgcaattacagcttcttccagtaccagtataagtggtagtttatttgacaaaagaagacttttgattggtcagccactcccaaataaaatgactgtatttccaaagaataaaagttcaactgatttttcttcttcaggagatggaaacagtttttatactcagtggggaaatcaagaaaccagtaatagtggaaggggaagagtaattcaagatgcagaagaaaggccacattctcgataccttcgtagagcttattcctctgatagatctggcacttctaatagacagtctcaagcaaaaacatatacaatggaacgatgtcactcagcagaaatgctttcagtgtccaaaagatcaggaggaggtgaaaatgaagagaggtactcacccacagacaacaatgccaacatttttaacttctttaaagaaaagacatccagtagttctggatcttttgaaagacctgataacaatcaagcactctccaatcatctttgtccaggaaaaactccttttccatttgcagacccgacacctcagactgaaaccgtacaacagtggtttgggaatctgcaaataaatgctcatttaagaaaaactactgaatatgacagcatcagcccaaaccgggacttccagggccatccagatttgcagaaggacacatcaaaaaatgcctggactgatacaaaagtcaaaaagaactctgatgcttctgataatgcacattctgtaaaacagcaaaataccatgaaatatatgactgcacttcacagtaaacctgagataatccaacaagaatgtgtttttggctcagatcctctttctgaacagagcaagactaggggtatggagccaccatggggttatcagaatcgtacattaagaagcattacatctccgttggttgctcacaggttaaaaccaatcagacagaaaaccaaaaaggctgtggtgagcatacttgattcagaggaggtgtgtgtggagcttgtaaaggagtatgcatctcaagaatatgtgaaagaagttcttcagatatctagtgatggaaatacgatcactatttattatccaaatggtggtagaggttttcctcttgctgatagaccaccctcacctactgacaacatcagtaggtacagctttgacaatttaccagaaaaatactggcgaaaatatcaatatgcttccaggtttgtacagcttctaagatctaaatctcccaaaatcacttattttacaagatatgctaaatgcattttgatggagaattctcctggtgctgattttgaggtttggttttatgatggggtaaaaatacacaaaacagaagatttcattcaggtgattgaaaagacagggaagtcttacactttaaaaagtgaaagtgaagttaatagcttgaaagaggagataaaaatgtatatggaccatgctaatgagggtcatcgtatttgtttagcactggaatccataatttcagaagaggaaaggaaaactaggagtgctccctttttcccaataatcataggaagaaaacctggtagtactagttcacctaaggccttatcacctcctccttctgtggattcaaattacccaacgagagatagagcatctttcaacagaatggtcatgcatagtgatgcttctccaacacaggcaccaatccttaatccctctatggttacaaatgaaggacttggtcttacaactacagcttctggaacagacatctcttctaatagtctaaaagattgtcttcctaaatcagcacaacttttgaaatctgtttttgtgaaaaatgttggttgggctacacagttaactagtggagctgtgtgggttcagtttaatgatgggtcccagttggttgtgcaggcaggagtgtcttctatcagttatacctcaccaaatggtcaaacaactaggtatggagaaaatgaaaaattaccagactacatcaaacagaaattacagtgtctgtcttccatccttttgatgttttctaatccgactcctaattttcattgattaaaactcctttcagacatataagtttaataaataacttttttgttgactttcaagtaaagtgattttttttaatttaacataaagtcttcagaaagcctttctatgaaagaattttaacctataatgtaaaccatgtatctgagataacaaagcagaatgaaacttgagtcacttactaaatatagtggatataaaatagaacacctgactttgctcttagaccataa

SEQ ID NO: 58 - DNA, 3007 bp, Homo sapiens
gcccggagagccgcatctattggcagctttgttattgatcagaaactgctcgccgccgacttggcttccagtctggctgcgggcaacccttgagttttcgcctctgtcctgtcccccgaactgacaggtgctcccagcaacttgctggggacttctcgccgctcccccgcgtccccaccccctcattcctccctcgccttcacccccacccccaccacttcgccacagctcaggatttgtttaaaccttgggaaactggttcaggtccaggttttgctttgatccttttcaaaaactggagacacagaagagggctctaggaaaaagttttggatgggattatgtggaaactaccctgcgattctctgctgccagagcaggctcggcgcttccaccccagtgcagccttcccctggcggtggtgaaagagactcgggagtcgctgcttccaaagtgcccgccgtgagtgagctctcaccccagtcagccaaatgagcctcttcgggcttctcctgctgacatctgccctggccggccagagacaggggactcaggcggaatccaacctgagtagtaaattccagttttccagcaacaaggaacagaacggagtacaagatcctcagcatgagagaattattactgtgtctactaatggaagtattcacagcccaaggtttcctcatacttatccaagaaatacggtcttggtatggagattagtagcagtagaggaaaatgtatggatacaacttacgtttgatgaaagatttgggcttgaagacccagaagatgacatatgcaagtatgattttgtagaagttgaggaacccagtgatggaactatattagggcgctggtgtggttctggtactgtaccaggaaaacagatttctaaaggaaatcaaattaggataagatttgtatctgatgaatattttccttctgaaccagggttctgcatccactacaacattgtcatgccacaattcacagaagctgtgagtccttcagtgctacccccttcagctttgccactggacctgcttaataatgctataactgcctttagtaccttggaagaccttattcgatatcttgaaccagagagatggcagttggacttagaagatctatataggccaacttggcaacttcttggcaaggcttttgtttttggaagaaaatccagagtggtggatctgaaccttctaacagaggaggtaagattatacagctgcacacctcgtaacttctcagtgtccataagggaagaactaaagagaaccgataccattttctggccaggttgtctcctggttaaacgctgtggtgggaactgtgcctgttgtctccacaattgcaatgaatgtcaatgtgtcccaagcaaagttactaaaaaataccacgaggtccttcagttgagaccaaagaccggtgtcaggggattgcacaaatcactcaccgacgtggccctggagcaccatgaggagtgtgactgtgtgtgcagagggagcacaggaggatagccgcatcaccaccagcagctcttgcccagagctgtgcagtgcagtggctgattctattagagaacgtatgcgttatctccatccttaatctcagttgtttgcttcaaggacctttcatcttcaggatttacagtgcattctgaaagaggagacatcaaacagaattaggagttgtgcaacagctcttttgagaggaggcctaaaggacaggagaaaaggtcttcaatcgtggaaagaaaattaaatgttgtattaaatagatcaccagctagtttcagagttaccatgtacgtattccactagctgggttctgtatttcagttctttcgatacggcttagggtaatgtcagtacaggaaaaaaactgtgcaagtgagcacctgattccgttgccttgcttaactctaaagctccatgtcctgggcctaaaatcgtataaaatctggatttttttttttttttttgctcatattcacatatgtaaaccagaacattctatgtactacaaacctggtttttaaaaaggaactatgttgctatgaattaaacttgtgtcgtgctgataggacagactggatttttcatatttcttattaaaatttctgccatttagaagaagagaactacattcatggtttggaagagataaacctgaaaagaagagtggccttatcttcactttatcgataagtcagtttatttgtttcattgtgtacatttttatattctccttttgacattataactgttggcttttctaatcttgttaaatatatctatttttaccaaaggtatttaatattcttttttatgacaacttagatcaactatttttagcttggtaaatttttctaaacacaattgttatagccagaggaacaaagatgatataaaatattgttgctctgacaaaaatacatgtatttcattctcgtatggtgctagagttagattaatctgcattttaaaaaactgaattggaatagaattggtaagttgcaaagactttttgaaaataattaaattatcatatcttccattcctgttattggagatgaaaataaaaagcaacttatgaaagtagacattcagatccagccattactaacctattccttttttggggaaatctgagcctagctcagaaaaacataaagcaccttgaaaaagacttggcagcttcctgataaagcgtgctgtgctgtgcagtaggaacacatcctatttattgtgatgttgtggttttattatcttaaactctgttccatacacttgtataaatacatggatatttttatgtacagaagtatgtctcttaaccagttcacttattgtactctggcaatttaaaagaaaatcagtaaaatattttgcttgtaaaatgcttaatatcgtgcctaggttatgtggtgactatttgaatcaaaaatgtattgaatcatcaaataaaagaatgtggctattttggggagaaaatt

SEQ ID NO: 59 - protein, 1002 aa, Homo sapiens
MAAHEWDWFQREELIGQISDIRVQNLQVERENVQKRTFTRWINLHLEKCNPPLEVKDLFVDIQDGKILMALLEVLSGRNLLHEYKSSSHRIFRLNNIAKALKFLEDSNVKLVSIDAAEIADGNPSLVLGLIWNIILFFQIKELTGNLSRNSPSSSLSPGSGGTDSDSSFPPTPTAERSVAISVKDQRKAIKALLAWVQRKTRKYGVAVQDFAGSWRSGLAFLAVIKAIDPSLVDMKQALENSTRENLEKAFSIAQDALHIPRLLEPEDIMVDTPDEQSIMTYVAQFLERFPELEAEDIFDSDKEVPIESTFVRIKETPSEQESKVFVLTENGERTYTVNHETSHPPPSKVFVCDKPESMKEFRLDGVSSHALSDSSTEFMHQIIDQVLQGGPGKTSDISEPSPESSILSSRKENGRSNSLPIKKTVHFEADTYKDPFCSKNLSLCFEGSPRVAKESLRQDGHVLAVEVAEEKEQKQESSKIPESSSDKVAGDIFLVEGTNNNSQSSSCNGALESTARHDEESHSLSPPGENTVMADSFQIKVNLMTVEALEEGDYFEAIPLKASKFNSDLIDFASTSQAFNKVPSPHETKPDEDAEAFENHAEKLGKRSIKSAHKKKDSPEPQVKMDKHEPHQDSGEEAEGCPSAPEETPVDKKPEVHEKAKRKSTRPHYEEEGEDDDLQGVGEELSSSPPSSCVSLETLGSHSEEGLDFKPSPPLSKVSVIPHDLFYFPHYEVPLAAVLEAYVEDPEDLKNEEMDLEEPEGYMPDLDSREEEADGSQSSSSSSVPGESLPSASDQVLYLSRGGVGTTPASEPAPLAPHEDHQQRETKENDPMDSHQSQESPNLENIANPLEENVTKESISSKKKEKRKHVDHVESSLFVAPGSVQSSDDLEEDSSDYSIPSRTSHSDSSIYLRRHTHRSSESDHFSYVQLRNAADLDDRRNRILTRKANSSGEAMSLGSHSPQSDSLTQLVQQPDMMYFILFLWLLVYCLLLFPQLDVSRL

SEQ ID NO: 60 - protein, 108 aa, Homo sapiens
MGVEIETISPGDGRTFPKKGQTCVVHYTGMLQNGKKFDSSRDRNKPFKFRIGKQEVIKGFEEGAAQMSLGQRAKLTCTPDVAYGATGHPGVIPPNATLIFDVELLNLE

SEQ ID NO: 61 - protein, 80 aa, Homo sapiens
MGVEIETISPGDGRTFPKKGQTCVVHYTGMLQNGKKFDSSRDRNKPFKFRIGKQEVIKGFEEGAAQLGPLSPLPICPHPC

SEQ ID NO: 62 - protein, 1357 aa, Homo sapiens
MEFYESAYFIVLIPSIVITVIFLFFWLFMKETLYDEVLAKQKREQKLIPTKTDKKKAEKKKNKKKEIQNGNLHESDSESVPRDFKLSDALAVEDDQVAPVPLNVVETSSSVRERKKKEKKQKPVLEEQVIKESDASKIPGKKVEPVPVTKQPTPPSEAAASKKKPGQKKSKNGSDDQDKKVETLMVPSKRQEALPLHQETKQESGSGKKKASSKKQKTENVFVDEPLIHATTYIPLMDNADSSPVVDKREVIDLLKPDQVEGIQKSGTKKLKTETDKENAEVKFKDFLLSLKTMMFSEDEALCVVDLLKEKSGVIQDALKKSSKGELTTLIHQLQEKDKLLAAVKEDAAATKDRCKQLTQEMMTEKERSNVVITRMKDRIGTLEKEHNVFQNKIHVSYQETQQMQMKFQQVREQMEAEIAHLKQENGILRDAVSNTTNQLESKQSAELNKLRQDYARLVNELTEKTGKLQQEEVQKKNAEQAATQLKVQLQEAERRWEEVQSYIRKRTAEHEAAQQDLQSKFVAKENEVQSLHSKLTDTLVSKQQLEQRLMQLMESEQKRVNKEESLQMQVQDILEQNEALKAQIQQFHSQIAAQTSASVLAEELHKVIAEKDKQIKQTEDSLASERDRLTSKEEELKDIQNMNFLLKAEVQKLQALANEQAAAAHELEKMQQSVYVKDDKIRLLEEQLQHEISNKMEEFKILNDQNKALKSEVQKLQTLVSEQPNKDVVEQMEKCIQEKDEKLKTVEELLETGLIQVATKEEELNAIRTENSSLTKEVQDLKAKQNDQVSFASLVEELKKVIHEKDGKIKSVEELLEAELLKVANKEKTVQDLKQEIKALKEEIGNVQLEKAQQLSITSKVQELQNLLKGKEEQMNTMKAVLEEKEKDLANTGKWLQDLQEENESLKAHVQEVAQHNLKEASSASQFEELEIVLKEKENELKRLEAMLKERESDLSSKTQLLQDVQDENKLFKSQIEQLKQQNYQQASSFPPHEELLKVISEREKEISGLWNELDSLKDAVEHQRKKNNDLREKNWEAMEALASTEKMLQDKVNKTSKERQQQVEAVELEAKEVLKKLFPKVSVPSNLSYGEWLHGFEKKAKECMAGTSGSEEVKVLEHKLKEADEMHTLLQLECEKYKSVLAETEGILQKLQRSVEQEENKWKVKVDESHKTIKQMQSSFTSSEQELERLRSENKDIENLRREREHLEMELEKAEMERSTYVTEVRELKDLLTELQKKLDDSYSEAVRQNEELNLLKAQLNETLTKLRTEQNERQKVAGDLHKAQQSLELIQSKIVKAAGDTTVIENSDVSPETESSEKETMSVSLNQTVTQLQQLLQAVNQQLTKEKEHYQVLE

SEQ ID NO: 63 - protein, 537 aa, Homo sapiens
MAAQCVTKVALNVSCANLLDKDIGSKSDPLCVLFLNTSGQQWYEVERTERIKNCLNPQFSKTFIIDYYFEVVQKLKFGVYDIDNKTIELSDDDFLGECECTLGQIVSSKKLTRPLVMKTGRPAGKGSITISAEEIKDNRVVLFEMEARKLDNKDLFGKSDPYLEFHKQTSDGNWLMVHRTEVVKNNLNPVWRPFKISLNSLCYGDMDKTIKVECYDYDNDGSHDLIGTFQTTMTKLKEASRSSPVEFECINEKKRQKKKSYKNSGVISVKQCEITVECTFLDYIMGGCQLNFTVGVDFTGSNGDPRSPDSLHYISPNGVNEYLTALWSVGLVIQDYDADKMFPAFGFGAQIPPQWQVSHEFPMNFNPSNPYCNGIQGIVEAYRSCLPQIKLYGPTNFSPIINHVARFAAAATQQQTASQYFVLLIITDGVITDLDETRQAIVNASRLPMSIIIVGVGGADFSAMEFLDGDGGSLRSPLGEVAIRDIVQFVPFRQFQNAPKEALAQCVLAEIPQQVVGYFNTYKLLPPKNPATKQQKQ

SEQ ID NO: 64 - protein, 496 aa, Homo sapiens
MASSTGDRSQAVRHGLRAKVLTLDGMNPRVRRVEYAVRGPIVQRALELEQELRQGVKKPFTEVIRANIGDAQAMGQRPITFLRQVLALCVNPDLLSSPNFPDDAKKRAERILQACGGHSLGAYSVSSGIQLIREDVARYIERRDGGIPADPNNVFLSTGASDAIVTVLKLLVAGEGHTRTGVLIPIPQYPLYSATLAELGAVQVDYYLDEERAWALDVAELHRALGQARDHCRPRALCVINPGNPTGQVQTRECIEAVIRFAFEERLFLLADEVYQDNVYAAGSQFHSFKKVLMEMGPPYAGQQELASFHSTSKGYMGECGFRGGYVEVVNMDAAVQQQMLKLMSVRLCPPVPGQALLDLVVSPPAPTDPSFAQFQAEKQAVLAELAAKAKLTEQVFNEAPGISCNPVQGAMYSFPRVQLPPRAVERAQELGLAPDMFFCLRLLEETGICVVPGSGFGQREGTYHFRMTILPPLEKLRLLLEKLSRFHAKFTLEYS

SEQ ID NO: 65 - protein, 2602 aa, Homo sapiens
MPVTEKDLAEDAPWKKIQQNTFTRWCNEHLKCVNKRIGNLQTDLSDGLRLIALLEVLSQKRMYRKYHQRPTFRQMQLENVSVALEFLDRESIKLVSIDSKAIVDGNLKLILGLVWTLILHYSISMPVWEDEGDDDAKKQTPKQRLLGWIQNKIPYLPITNFNQNWQDGKALGALVDSCAPGLCPDWESWDPQKPVDNAREAMQQADDWLGVPQVITPEEIIHPDVDEHSVMTYLSQFPKAKLKPGAPLKPKLNPKKARAYGRGIEPTGNMVKQPAKFTVDTISAGQGDVMVFVEDPEGNKEEAQVTPDSDKNKTYSVEYLPKVTGLHKVTVLFAGQHISKSPFEVSVDKAQGDASKVTAKGPGLEAVGNIANKPTYFDIYTAGAGVGDIGVEVEDPQGKNTVELLVEDKGNQVYRCVYKPMQPGPHVVKIFFAGDTIPKSPFVVQVGEACNPNACRASGRGLQPKGVRIRETTDFKVDTKAAGSGELGVTMKGPKGLEELVKQKDFLDGVYAFEYYPSTPGRYSIAITWGGHHIPKSPFEVQVGPEAGMQKVRAWGPGLHGGIVGRSADFVVESIGSEVGSLGFAIEGPSQAKIEYNDQNDGSCDVKYWPKEPGEYAVHIMCDDEDIKDSPYMAFIHPATGGYNPDLVRAYGPGLEKSGCIVNNLAEFTVDPKDAGKAPLKIFAQDGEGQRIDIQMKNRMDGTYACSYTPVKAIKHTIAVVWGGVNIPHSPYRVNIGQGSHPQKVKVFGPGVERSGLKANEPTHFTVDCTEAGEGDVSVGIKCDARVLSEDEEDVDFDIIHNANDTFTVKYVPPAAGRYTIKVLFASQEIPASPFRVKVDPSHDASKVKAEGPGLSKAGVENGKPTHFTVYTKGAGKAPLNVQFNSPLPGDAVKDLDIIDNYDYSHTVKYTPTQQGNMQVLVTYGGDPIPKSPFTVGVAAPLDLSKIKLNGLENRVEVGKDQEFTVDTRGAGGQGKLDVTILSPSRKVVPCLVTPVTGRENSTAKFIPREEGLYAVDVTYDGHPVPGSPYTVEASLPPDPSKVKAHGPGLEGGLVGKPAEFTIDTKGAGTGGLGLTVEGPCEAKIECSDNGDGTCSVSYLPTKPGEYFVNILFEEVHIPGSPFKADIEMPFDPSKVVASGPGLEHGKVGEAGLLSVNCSEAGPGALGLEAVSDSGTKAEVSIQNNKDGTYAVTYVPLTAGMYTLTMKYGGELVPHFPARVKVEPAVDTSRIKVFGPGIEGKDVFREATTDFTVDSRPLTQVGGDHIKAHIANPSGASTECFVTDNADGTYQVEYTPFEKGLHVVEVTYDDVPIPNSPFKVAVTEGCQPSRVQAQGPGLKEAFTNKPNVFTVVTRGAGIGGLGITVEGPSESKINCRDNKDGSCSAEYIPFAPGDYDVNITYGGAHIPGSPFRVPVKDVVDPSKVKIAGPGLGSGVRARVLQSFTVDSSKAGLAPLEVRVLGPRGLVEPVNMVDNGDGTHTVTYTPSQEGPYMVSVKYADEEIPRSPFKVKVLPTYDASKVTASGPGLSSYGVPASLPVDFAIDARDAGEGLLAVQITDQEGKPKRAIVHDNKDGTYAVTYIPDKTGRYMIGVTYGGDDIPLSPYRIRATQTGDASKCLATGPGIASTVKTGEEVGFVVDAKTAGKGKVTCTVLTPDGTEAEADVIENEDGTYDIFYTAAKPGTYVIYVRFGGVDIPNSPFTVMATDGEVTAVEEAPVNACPPGFRPWVTEEAYVPVSDMNGLGFKPFDLVIPFAVRKGEITGEVHMPSGKTATPEIVDNKDGTVTVRYAPTEVGLHEMHIKYMGSHIPESPLQFYVNYPNSGSVSAYGPGLVYGVANKTATFTIVTEDAGEGGLDLAIEGPSKAEISCIDNKDGTCTVTYLPTLPGDYSILVKYNDKHIPGSPFTAKITDDSRRCSQVKLGSAADFLLDISETDLSSLTASIKAPSGRDEPCLLKRLPNNHIGISFIPREVGEHLVSIKKNGNHVANSPVSIMVVQSEIGDARRAKVYGRGLSEGRTFEMSDFIVDTRDAGYGGISLAVEGPSKVDIQTEDLEDGTCKVSYFPTVPGVYIVSTKFADEHVPGSPFTVKISGEGRVKESITRTSRAPSVATVGSICDLNLKIPEINSSDMSAHVTSPSGRVTEAEIVPMGKNSHCVRFVPQEMGVHTVSVKYRGQHVTGSPFQFTVGPLGEGGAHKVRAGGPGLERGEAGVPAEFSIWTREAGAGGLSIAVEGPSKAEITFDDHKNGSCGVSYIAQEPGNYEVSIKFNDEHIPESPYLVPVIAPSDDARRLTVMSLQESGLKVNQPASFAIRLNGAKGKIDAKVHSPSGAVEECHVSELEPDKYAVRFIPHENGVHTIDVKFNGSHVVGSPFKVRVGEPGQAGNPALVSAYGTGLEGGTTGIQSEFFINTTRAGPGTLSVTIEGPSKVKMDCQETPEGYKVMYTPMAPGNYLISVKYGGPNHIVGSPFKAKVTGQRLVSPGSANETSSILVESVTRSSTETCYSAIPKASSDASKVTSKGAGLSKAFVGQKSSFLVDCSKAGSNMLLIGVHGPTTPCEEVSMKHVGNQQYNVTYVVKERGDYVLAVKWGEEHIPGSPFHVTVP

SEQ ID NO: 66 - protein, 686 aa, Homo sapiens
MMIQWNGPKTSISEKARGLALTYSLRDRERGGGRAQIGVVDDEAKAPDLMQIMEAVLGCRVGSLRAATPSKDINQLQKANVRLYHVYEKGKDLVVLELATPPLTQDLLQEEDFYILDQGGFKIYVWQGRMSSLQERKAAFSRAVGFIQAKGYPTYTNVEVVNDGAESAAFKQLFRTWSEKRRRNQKLGGRDKSIHVKLDVGKLHTQPKLAAQLRMVDDGSGKVEVWCIQDLHRQPVDPKRHGQLCAGNCYLVLYTYQRLGRVQYILYLWQGHQATADEIEALNSNAEELDVMYGGVLVQEHVTMGSEPPHFLAIFQGQLVIFQERAGHHGKGQSASTTRLFQVQGTDSHNTRTMEVPARASSLNSSDIFLLVTASVCYLWFGKGCNGDQREMARVVVTVISRKNEETVLEGQEPPHFWEALGGRAPYPSNKRLPEEVPSFQPRLFECSSHMGCLVLAEVGFFSQEDLDKYDIMLLDTWQEIFLWLGEAASEWKEAVAWGQEYLKTHPAGRSPATPIVLVKQGHEPPTFIGWFFTWDPYKWTSHPSHKEVVDGSPAAASTISEITAEVNNLRLSRWPGNGRAGAVALQALKGSQDSSENDLVRSPKSAGSRTSSSVSSTSATINGGLRREQLMHQAVEDLPEGVDPARREFYLSDSDFQDIFGKSKEEFYSMATWRQRQEKKQLGFF

SEQ ID NO: 67 - protein, 342 aa, Homo sapiens
MSSSGTLSNYYVDSLIGHEGDEVFAARFGPPGPGAQGRPAGVADGPAATAAEFASCSFAPRSAVFSASWSAVPSQPPAAAAMSGLYHPYVPPPPLAASASEPGRYVRSWMEPLPGFPGGAGGGGGGGGGGPGRGPSPGPSGPANGRHYGIKPETRAAPAPATAASTTSSSSTSLSSSSKRTECSVARESQGSSGPEFSCNSFLQEKAAAATGGTGPGAGIGAATGTGGSSEPSACSDHPIPGCSLKEEEKQHSQPQQQQLDPNNPAANWIHARSTRKKRCPYTKYQTLELEKEFLFNMYLTRDRRYEVARILNLTERQVKIWFQNRRMKMKKMSKEKCPKGD

SEQ ID NO: 68 - protein, 1719 aa, Homo sapiens
MSGEVRLRQLEQFILDGPAQTNGQCFSVETLLDILICLYDECNNSPLRREKNILEYLEWAKPFTSKVKQMRLHREDFEILKVIGRGAFGEVAVVKLKNADKVFAMKILNKWEMLKRAETACFREERDVLVNGDNKWITTLHYAFQDDNNLYLVMDYYVGGDLLTLLSKFEDRLPEDMARFYLAEMVIAIDSVHQLHYVHRDIKPDNILMDMNGHIRLADFGSCLKLMEDGTVQSSVAVGTPDYISPEILQAMEDGKGRYGPECDWWSLGVCMYEMLYGETPFYAESLVETYGKIMNHKERFQFPAQVTDVSENAKDLIRRLICSREHRLGQNGIEDFKKHPFFSGIDWDNIRNCEAPYIPEVSSPTDTSNFDVDDDCLKNSETMPPPTHTAFSGHHLPFVGFTYTSSCVLSDRSCLRVTAGPTSLDLDVNVQRTLDNNLATEAYERRIKRLEQEKLELSRKLQESTQTVQALQYSTVDGPLTASKDLEIKNLKEEIEKLRKQVTESSHLEQQLEEANAVRQELDDAFRQIKAYEKQIKTLQQEREDLNKELVQASERLKNQSKELKDAHCQRKLAMQEFMEINERLTELHTQKQKLARHVRDKEEEVDLVMQKVESLRQELRRTERAKKELEVHTEALAAEASKDRKLREQSEHYSKQLENELEGLKQKQISYSPGVCSIEHQQEITKLKTDLEKKSIFYEEELSKREGIHANEIKNLKKELHDSEGQQLALNKEIMILKDKLEKTRRESQSEREEFESEFKQQYEREKVLLTEENKKLTSELDKLTTLYENLSIHNQQLEEEVKDLADKKESVAHWEAQITEIIQWVSDEKDARGYLQALASKMTEELEALRNSSLGTRATDMPWKMRRFAKLDMSARLELQSALDAEIRAKQAIQEELNKVKASNIITECKLKDSEKKNLELLSEIEQLIKDTEELRSEKGIEHQDSQHSFLAFLNTPTDALDQFETVDSTPLSVHTPTLRKKGCPGSTGFPPKRKTHQFFVKSFTTPTKCHQCTSLMVGLIRQGCSCEVCGFSCHITCVNKAPTTCPVPPEQTKGPLGIDPQKGIGTAYEGHVRIPKPAGVKKGWQRALAIVCDFKLFLYDIAEGKASQPSVVISQVIDMRDEEFSVSSVLASDVIHASRKDIPCIFRVTASQLSASNNKCSILMLADTENEKNKWVGVLSELHKILKKNKFRDRSVYVPKEAYDSTLPLIKTTQAAAIIDHERIALGNEEGLFVVHVTKDEIIRVGDNKKIHQIELIPNDQLVAVISGRNRHVRLFPMSALDGRETDFYKLSETKGCQTVTSGKVRHGALTCLCVAMKRQVLCYELFQSKTRHRKFKEIQVPYNVQWMAIFSEQLCVGFQSGFLRYPLNGEGNPYSMLHSNDHTLSFIAHQPMDAICAVEISSKEYLLCFNSIGIYTDCQGRRSRQQELMWPANPSSCCYNAPYLSVYSENAVDIFDVNSMEWIQTLPLKKVRPLNNEGSLNLLGLETIRLIYFKNKMAEGDELVVPETSDNSRKQMVRNINNKRRYSFRVPEEERMQQRREMLRDPEMRNKLISNPTNFNHIAHMGPGDGIQILKDLPMNPRPQESRTVFSGSVSIPSITKSRPEPGRSMSASSGLSARSSAQNGSALKREFSGGSYSAKRQPMPSPSEGSLSSGGMDQGSDAPARDFDGEDSDSPRHSTASNSSNLSSPPSPASPRKTKSLSLESTDRGSWDP

SEQ ID NO: 69 - protein, 1638 aa, Homo sapiens
MSGEVRLRQLEQFILDGPAQTNGQCFSVETLLDILICLYDECNNSPLRREKNILEYLEWAKPFTSKVKQMRLHREDFEILKVIGRGAFGEVAVVKLKNADKVFAMKILNKWEMLKRAETACFREERDVLVNGDNKWITTLHYAFQDDNNLYLVMDYYVGGDLLTLLSKFEDRLPEDMARFYLAEMVIAIDSVHQLHYVHRDIKPDNILMDMNGHIRLADFGSCLKLMEDGTVQSSVAVGTPDYISPEILQAMEDGKGRYGPECDWWSLGVCMYEMLYGETPFYAESLVETYGKIMNHKERFQFPAQVTDVSENAKDLIRRLICSREHRLGQNGIEDFKKHPFFSGIDWDNIRNCEAPYIPEVSSPTDTSNFDVDDDCLKNSETMPPPTHTAFSGHHLPFVGFTYTSSCVLSDRSCLRVTAGPTSLDLDVNVQRTLDNNLATEAYERRIKRLEQEKLELSRKLQESTQTVQALQYSTVDGPLTASKDLEIKNLKEEIEKLRKQVTESSHLEQQLEEANAVRQELDDAFRQIKAYEKQIKTLQQEREDLNKLEVHTEALAAEASKDRKLREQSEHYSKQLENELEGLKQKQISYSPGVCSIEHQQEITKLKTDLEKKSIFYEEELSKREGIHANEIKNLKKELHDSEGQQLALNKEIMILKDKLEKTRRESQSEREEFESEFKQQYEREKVLLTEENKKLTSELDKLTTLYENLSIHNQQLEEEVKDLADKKESVAHWEAQITEIIQWVSDEKDARGYLQALASKMTEELEALRNSSLGTRATDMPWKMRRFAKLDMSARLELQSALDAEIRAKQAIQEELNKVKASNIITECKLKDSEKKNLELLSEIEQLIKDTEELRSEKGIEHQDSQHSFLAFLNTPTDALDQFETVDSTPLSVHTPTLRKKGCPGSTGFPPKRKTHQFFVKSFTTPTKCHQCTSLMVGLIRQGCSCEVCGFSCHITCVNKAPTTCPVPPEQTKGPLGIDPQKGIGTAYEGHVRIPKPAGVKKGWQRALAIVCDFKLFLYDIAEGKASQPSVVISQVIDMRDEEFSVSSVLASDVIHASRKDIPCIFRVTASQLSASNNKCSILMLADTENEKNKWVGVLSELHKILKKNKFRDRSVYVPKEAYDSTLPLIKTTQAAAIIDHERIALGNEEGLFVVHVTKDEIIRVGDNKKIHQIELIPNDQLVAVISGRNRHVRLFPMSALDGRETDFYKLSETKGCQTVTSGKVRHGALTCLCVAMKRQVLCYELFQSKTRHRKFKEIQVPYNVQWMAIFSEQLCVGFQSGFLRYPLNGEGNPYSMLHSNDHTLSFIAHQPMDAICAVEISSKEYLLCFNSIGIYTDCQGRRSRQQELMWPANPSSCCYNAPYLSVYSENAVDIFDVNSMEWIQTLPLKKVRPLNNEGSLNLLGLETIRLIYFKNKMAEGDELVVPETSDNSRKQMVRNINNKRRYSFRVPEEERMQQRREMLRDPEMRNKLISNPTNFNHIAHMGPGDGIQILKDLPMNPRPQESRTVFSGSVSIPSITKSRPEPGRSMSASSGLSARSSAQNGSALKREFSGGSYSAKRQPMPSPSEGSLSSGGMDQGSDAPARDFDGEDSDSPRHSTASNSSNLSSPPSPASPRKTKSLSLESTDRGSWDP

SEQ ID NO: 70 - protein, 152 aa, Homo sapiens [sequence omitted]

SEQ ID NO: 71 - protein, 596 aa, Homo sapiens
MPQLNGGGGDDLGANDELISFKDEGEQEEKSSENSSAERDLADVKSSLVNESETNQNSSSDSEAERRPPPRSESFRDKSRESLEEAAKRQDGGLFKGPPYPGYPFIMIPDLTSPYLPNGSLSPTARTYLQMKWPLLDVQAGSLQSRQALKDARSPSPAHIVSNKVPVVQHPHHVHPLTPLITYSNEHFTPGNPPPHLPADVDPKTGIPRPPHPPDISPYYPLSPGTVGQIPHPLGWLVPQQGQPVYPITTGGFRHPYPTALTVNASVSRFPPHMVPPHHTLHTTGIPHPAIVTPTVKQESSQSDVGSLHSSKHQDSKKEEEKKKPHIKKPLNAFMLYMKEMRAKVVAECTLKESAAINQILGRRWHALSREEQAKYYELARKERQLHMQLYPGWSARDNYGKKKKRKRDKQPGETNEHSECFLNPCLSLPPITDLSAPKKCRARFGLDQQNNWCGPCRRKKKCVRYIQGEGSCLSPPSSDGSLLDSPPPSPNLLGSPPRDAKSQTEQTQPLSLSLKPDPLAHLSMMPPPPALLLAEATHKASALCPNGALDLPPAALQPAAPSSSIAQPSTSWLHSHSSLAGTQPQPLSLVTKSLE

SEQ ID NO: 72 - protein, 313 aa, Homo sapiens
METGPEDPSSMPEESSPRRTPQSIPYQDLPHLVNADGQYLFCRYWKPTGTPKALIFVSHGAGEHSGRYEELARMLMGLDLLVFAHDHVGHGQSEGERMVVSDFHVFVRDVLQHVDSMQKDYPGLPVFLLGHSMGGAIAILTAAERPGHFAGMVLISPLVLANPESATTFKVLAAKVLNLVLPNLSLGPIDSSVLSRNKTEVDIYNSDPLICRAGLKVCFGIQLLNAVSRVERALPKLTVPFLLLQGSADRLCDSKGAYLLMELAKSQDKTLKIYEGAYHVLHKELPEVTNSVFHEINMWVSQRTATAGTASPP

SEQ ID NO: 73 - protein, 424 aa, Homo sapiens
MQRLQVVLGHLRGPADSGWMPQAAPCLSGAPQASAADVVVVHGRRTAICRAGRGGFKDTTPDELLSAVMTAVLKDVNLRPEQLGDICVGNVLQPGAGAIMARIAQFLSDIPETVPLSTVNRQCSSGLQAVASIAGGIRNGSYDIGMACGVESMSLADRGNPGNITSRLMEKEKARDCLIPMGITSENVAERFGISREKQDTFALASQQKAARAQSKGCFQAEIVPVTTTVHDDKGTKRSITVTQDEGIRPSTTMEGLAKLKPAFKKDGSTTAGNSSQVSDGAAAILLARRSKAEELGLPILGVLRSYAVVGVPPDIMGIGPAYAIPVALQKAGLTVSDVDIFEINEAFASQAAYCVEKLRLPPEKVNPLGGAVALGHPLGCTGARQVITLLNELKRRGKRAYGVVSMCIGTGMGAAAVFEYPGN

SEQ ID NO: 74 - protein, 333 aa, Homo sapiens
MPLGLGRRKKAPPLVENEEAEPGRGGLGVGEPGPLGGGGSGGPQMGLPPPPPALRPRLVFHTQLAHGSPTGRIEGFTNVKELYGKIAEAFRLPTAEVMFCTLNTHKVDMDKLLGGQIGLEDFIFAHVKGQRKEVEVFKSEDALGLTITDNGAGYAFIKRIKEGSVIDHIHLISVGDMIEAINGQSLLGCRHYEVARLLKELPRGRTFTLKLTEPRKAFDMISQRSAGGRPGSGPQLGTGRGTLRLRSRGPATVEDLPSAFEEKAIEKVDDLLESYMGIRDTELAATMVELGKDKRNPDELAEALDERLGDFAFPDEFVFDVWGAIGDAKVGRY

SEQ ID NO: 75 - protein, 545 aa, Homo sapiens
MSNNGLDIQDKPPAPPMRNTSTMIGVGSKDAGTLNHGSKPLPPNPEEKKKKDRFYRSILPGDKTNKKKEKERPEISLPSDFEHTIHVGFDAVTGEFTGMPEQWARLLQTSNITKSEQKKNPQAVLDVLEFYNSKKTSNSQKYMSFTDKSAEDYNSSNALNVKAVSETPAVPPVSEDEDDDDDDATPPPVIAPRPEHTKSVYTRSVIEPLPVTPTRDVATSPISPTENNTTPPDALTRNTEKQKKKPKMSDEEILEKLRSIVSVGDPKKKYTRFEKIGQGASGTVYTAMDVATGQEVAIKQMNLQQQPKKELIINEILVMRENKNPNIVNYLDSYLVGDELWVVMEYLAGGSLTDVVTETCMDEGQIAAVCRECLQALEFLHSNQVIHRDIKSDNILLGMDGSVKLTDFGFCAQITPEQSKRSTMVGTPYWMAPEVVTRKAYGPKVDIWSLGIMAIEMIEGEPPYLNENPLRALYLIATNGTPELQNPEKLSAIFRDFLNRCLDMDVEKRGSAKELLQHQFLKIAKPLSSLTPLIAAAKEATKNNH

SEQ ID NO: 76 - protein, 115 aa, Homo sapiens
MVSRKAVAALLVVHVAAMLASQTEAFVPIFTYGELQRMQEKERNKGQKKSLSVWQRSGEEGPVDPAEPIREEENEMIKLTAPLEIGMRMNSRQLEKYPATLEGLLSEMLPQHAAK

SEQ ID NO: 77 - protein, 414 aa, Homo sapiens
MQTFLKGKRVGYWLSEKKIKKLNFQAFAELCRKRGMEVVQLNLSRPIEEQGPLDVIIHKLTDVILEADQNDSQSLELVHRFQEYIDAHPETIVLDPLPAIRTLLDRSKSYELIRKIEAYMEDDRICSPPFMELTSLCGDDTMRLLEKNGLTFPFICKTRVAHGTNSHEMAIVFNQEGLNAIQPPCVVQNFINHNAVLYKVFVVGESYTVVQRPSLKNFSAGTSDRESIFFNSHNVSKPESSSVLTELDKIEGVFERPSDEVIRELSRALRQALGVSLFGIDIIINNQTGQHAVIDINAFPGYEGVSEFFTDLLNHIATVLQGQSTAMAATGDVALLRHSKLLAEPAGGLVGERTCSASPGCCGSMMGQDAPWKAEADAGGTAKLPHQRLGCNAGVSPSFQQHCVASLATKASSQ

SEQ ID NO: 78 - protein, 1043 aa, Homo sapiens
MPLLEGSVGVEDLVLLEPLVEESLLKNLQLRYENKEIYTYIGNVVISVNPYQQLPIYGPEFIAKYQDYTFYELKPHIYALANVAYQSLRDRDRDQCILITGESGSGKTEASKLVMSYVAAVCGKGEQVNSVKEQLLQSNPVLEAFGNAKTIRNNNSSRFGKYMDIEFDFKGSPLGGVITNYLLEKSRLVKQLKGERNFHIFYQLLAGADEQLLKALKLERDTTGYAYLNHEVSRVDGMDDASSFRAVQSAMAVIGFSEEEIRQVLEVTSMVLKLGNVLVADEFQASGIPASGIRDGRGVREIGEMVGLNSEEVERALCSRTMETAKEKVVTALNVMQAQYARDALAKNIYSRLFDWIVNRINESIKVGIGEKKKVMGVLDIYGFEILEDNSFEQFVINYCNEKLQQVFIEMTLKEEQEEYKREGIPWTKVDYFDNGIICKLIEHNQRGILAMLDEECLRPGVVSDSTFLAKLNQLFSKHGHYESKVTQNAQRQYDHTMGLSCFRICHYAGKVTYNVTSFIDKNNDLLFRDLLQAMWKAQHPLLRSLFPEGNPKQASLKRPPTAGAQFKSSVAILMKNLYSKSPNYIRCIKPNEHQQRGQFSSDLVATQARYLGLLENVRVRRAGYAHRQGYGPFLERYRLLSRSTWPHWNGGDREGVEKVLGELSMSSGELAFGKTKIFIRSPKTLFYLEEQRRLRLQQLATLIQKIYRGWRCRTHYQLMRKSQILISSWFRGNMQKKCYGKIKASVLLIQAFVRGWKARKNYRKYFRSEAALTLADFIYKSMVQKFLLGLKNNLPSTNVLDKTWPAAPYKCLSTANQELQQLFYQWKCKRFRDQLSPKQVEILREKLCASELFKGKKASYPQSVPIPFCGDYIGLQGNPKLQKLKGGEEGPVLMAEAVKKVNRGNGKTSSRILLLTKGHVILTDTKKSQAKIVIGLDNVAGVSVTSLKDGLFSLHLSEMSSVGSKGDFLLVSEHVIELLTKMYRAVLDATQRQLTVTVTEKFSVRFKENSVAVKVVQGPAGGDNSKLRYKKKGSHCLEVTVQ

SEQ ID NO: 79 - protein, 638 aa, Homo sapiens
MIKGAIEVLIREYSSELNAPSQESDSHPRKKKKEKKEDIFRRFPVAPLIPYPLITKEDINAIEMEEDKRDLISREISKFRDTHKKLEEEKGKKEKERQEIEKERRERERERERERERREREREREREREREKEKERERERERDRDRDRTKERDRDRDRERDRDRDRERSSDRNKDRSRSREKSRDREREREREREREREREREREREREREREREREREREKDKKRDREEDEEDAYERRKLERKLREKEAAYQERLKNWEIRERKKTREYEKEAEREEERRREMAKEAKRLKEFLEDYDDDRDDPKYYRGSALQKRLRDREKEMEADERDRKREKEELEEIRQRLLAEGHPDPDAELQRMEQEAERRRQPQIKQEPESEEEEEEKQEKEEKREEPMEEEEEPEQKPCLKPTLRPISSAPSVSSASGNATPNTPGDESPCGIIIPHENSPDQQQPEEHRPKIGLSLKLGASNSPGQPNSVKRKKLPVDSVFNKFEDEDSDDVPRKRKLVPLDYGEDDKNATKGTVNTEEKRKHIKSLIEKIPTAKPELFAYPLDWSIVDSILMERRIRPWINKKIIEYIGEEEATLVDFVCSKVMAHSSPQSILDDVAMVLDEEAEVFIVKMWRLLIYETEAKKIGLVK

SEQ ID NO: 80 - protein, 940 aa, Homo sapiens
MGSGPIDPKELLKGLDSFLNRDGEVKSVDGISKIFSLMKEARKMVSRCTYLNILLQTRSPEILVKFIDVGGYKLLNNWLTYSKTTNNIPLLQQILLTLQHLPLTVDHLKQNNTAKLVKQLSKSSEDEELRKLASVLVSDWMAVIRSQSSTQPAEKDKKKRKDEGKSRTTLPERPLTEVKAETRAEEAPEKKREKPKSLRTTAPSHAKFRSTGLELETPSLVPVKKNASTVVVSDKYNLKPIPLKRQSNVAAPGDATPPAEKKYKPLNTTPNATKEIKVKIIPPQPMEGLGFLDALNSAPVPGIKIKKKKKVLSPTAAKPSPFEGKTSTEPSTAKPSSPEPAPPSEAMDADRPGTPVPPVEVPELMDTASLEPGALDAKPVESPGDPNQLTRKGRKRKSVTWPEEGKLREYFYFELDETERVNVNKIKDFGEAAKREILSDRHAFETARRLSHDNMEEKVPWVCPRPLVLPSPLVTPGSNSQERYIQAEREKGILQELFLNKESPHEPDPEPYEPIPPKLIPLDEECSMDETPYVETLEPGGSGGSPDGAGGSKLPPVLANLMGSMGAGKGPQGPGGGGINVQEILTSIMGSPNSHPSEELLKQPDYSDKIKQMLVPHGLLGPGPIANGFPPGGPGGPKGMQHFPPGPGGPMPGPHGGPGGPVGPRLLGPPPPPRGGDPFWDGPGDPMRGGPMRGGPGPGPGPYHRGRGGRGGNEPPPPPPPFRGARGGRSGGGPPNGRGGPGGGMVGGGGHRPHEGPGGGMGNSSGHRPHEGPGGGMGSGHRPHEGPGGSMGGGGGHRPHEGPGGGISGGSGHRPHEGPGGGMGAGGGHRPHEGPGGSMGGSGGHRPHEGPGHGGPHGHRPHDVPGHRGHDHRGPPPHEHRGHDGPGHGGGGHRGHDGGHSHGGDMSNRPVCRHFMMKGNCRYENNCAFYHPGVNGPPLP

SEQ ID NO: 81 - protein, 953 aa, Homo sapiens
MAETLPGSGDSGPGTASLGPGVAETGTRRLSELRVIDLRAELKKRNLDTGGNKSVLMERLKKAVKEEGQDPDEIGIELEATSKKSAKRCVKGLKMEEEGTEDNGLEDDSRDGQEDMEASLENLQNMGMMDMSVLDETEVANSSAPDFGEDGTDGLLDSFCDSKEYVAAQLRQLPAQPPEHAVDGEGFKNTLETSSLNFKVTPDIEESLLEPENEKILDILGETCKSEPVKEESSELEQPFAQDTSSVGPDRKLAEEEDLFDSAHPEEGDLDLASESTAHAQSSKADSLLAVVKREPAEQPGDGERTDCEPVGLEPAVEQSSAASELAEASSEELAEAPTEAPSPEARDSKEDGRKFDFDACNEVPPAPKESSTSEGADQKMSSFKEEKDIKPIIKDEKGRVGSGSGRNLWVSGLSSTTRATDLKNLFSKYGKVVGAKVVTNARSPGARCYGFVTMSTSDEATKCISHLHRTELHGRMISVEKAKNEPAGKKLSDRKECEVKKEKLSSVDRHHSVEIKIEKTVIKKEEKIEKKEEKKPEDIKKEEKDQDELKPGPTNRSRVTKSGSRGMERTVVMDKSKGEPVISVKTTSRSKERSSKSQDRKSESKEKRDILSFDKIKEQRERERQRQREREIRETERRREREQREREQRLEAFHERKEKARLQRERLQLECQRQRLERERMERERLERERMRVERERRKEQERIHREREELRRQQEQLRYEQERRPGRRPYDLDRRDDAYWPEGKRVAMEDRYRADFPRPDHRFHDFDHRDRGQYQDHAIDRREGSRPMMGDHRDGQHYGDDRHGHGGPPERHGRDSRDGWGGYGSDKRLSEGRGLPPPPRGGRDWGEHNQRLEEHQARAWQGAMDAGAASREHARWQGGERGLSGPSGPGHMASRGGVAGRGGFAQGGHSQGHVVPGGGLEGGGVASQDRGSRVPHPHPHPPPYPHFTRRY

SEQ ID NO: 82 - protein, 5858 aa, Homo sapiens
  MOD_RES (900)..(900): Xaa can be any naturally occurring amino acid
MGAPSACRTLVLALAAMLVVPQAECTGRSPYDSLSVLDGTLPVPNTGLWGPTGSQCQETQGLAWMGCPGEETQGPVEPSWENAGHTMDGGAPTSSPTRRVSFVPPVTVFPSLSRKQMLPLPAGKGVFASPKGGGPDLGVQLPPALNPAHNGRVCSTWGDFHYKTFDGDVFRFPGLCNYVFSEHCRAAYEDFNVQLRRGLVGSRPVVTRVVIKAQGLVLEASNGSVLINGQREELPYSRTGLLVEQSGDYIKVSIRLVLTFLWNGEDSALLELDPKYANQTCGLCGDFNGLPAFNEFYAHNARLTPLQFGNLQKLDGPTEQCPDPLPLPAGNCTDEPPWMAGVPSLAHCAPQEGICHRTLLGPAFAECHALVDSTAYLAACAQDLCRCPTCPCATFVEYSRQCAHAGGQPRNWRCPELCPRTCPLNMQHQECGSPCTDTCSNPQRAQLCEDHCVDGCFCPPGTVLDDITHSGCLPLGQCPCTHGGRTYSPGTSFNTTCSSCTCSGGLWQCQDLPCPGTCSVQGGAHISTYDEKLYDLHGDCSYVLSKSHIPHMGIPSTLLGGTPHHRARPNARVGPSPQKCADSSFTVLAELRKCGLTDNENCLKAVTLSLDGGDTAIRVQADGGVFLNSIYTQLPLSAANITLFTPSSFFIVVQTGLGLQLLVQLVPLMQVFVRLDPAHQGQMCGLCGNFNQNQADDFTALSGVVEATGAAFANTWKAQAACANARNSFEDPCSLSVENENYARHWCSRLTDPNSAFSRCHSIINPKPFHSNCMFDTCNCERSEDCLCAALSSYVHACAAKGVQLSDWRDGVCTKYMQNCPKSQRYAYVVDACQPTCRGLSEADVTCSVSFVPVDGCTCPAGTFLNDAGACVPAQECPCYAHGTVLAPGEVVHDEGAVWXGSGGKAGPPGCAAPMVYLDCSNSSAGTPGAECLRSCHTLDVGCFSTHCVSGCVCPPGLVSDGSGGCIAEEDCPCVHNEATYKPGETIRVDCNTCTCRNRRWECSHRLCLGTCVAYGDGHFITFDGDRYSFEGSCEYILAQDYCGDNTTHGTFRIVTENIPCGTTGTTCSKAIKLFVEVRTAPAVSTPDPAANEPAPREASVGFRQRLPPLQSYELILQEGTFKAVARGPGGDPPYKIRYMGIFLVIETHGMAVSWDRKTSVFIRLHQDYKGRVCGLCGNFDDNAINDFATRSRSVVGDALEFGNSWKLSPSCPDALAPKDPCTANPFRKSWAQKQCSILHGPTFAACRSQVDSTKYYEACVNDACACDSGGDCECFCTAVAAYAQACHDAGLCVSWRTPDTCPLFCDFYNPHGGCEWHYQPCGAPCLKTCRNPSGHCLVDLPGLEGCYPKCPPSQPFFNEDQMKCVAQCGCYDKDGNYYDVGARVPTAENCQSCNCTPSGIQCAHSLEACTCTYEDRTYSYQDVIYNTTDGLGACLIAICGSNGTIIRKAVACPGTPATTPFTFTTAWVPHSTTSPALPVSTVCVREVCRWSSWYNGHRPEPGLGGGDFETFENLRQRGYQVCPVLADIECRAAQLPDMPLEELGQQVDCDRMRGLMCANSQQSPPLCHDYELRVLCCEYVPCGPSPAPGTSPQPSLSASTEPAVPTPTQTTATEKTTLWVTPSIRSTAALTSQTGSSSGPVTVTPSAPGTTTCQPRCQWTEWFDEDYPKSEQLGGDVESYDKIRAAGGHLCQQPKDIECQAESFPNWTLAQVGQKVHCDVHFGLVCRNWEQEGVFKMCYNYRIRVLCCSDDHCRGRATTPPPTTELETATTTTTQALFSTPQPTSSPGLTRAPPASTTAVPTLSEGLTSPRYTSTLGTATTGGPTTPAGSTEPTVPGVATSTLPTRSALPGTTGSLGTWRPSQPPTLAPTTMATSRARPTGTASTASKEPLTTSLAPTLTSELSTSQAETSTPRTETTMSPLTNTTTSQGTTRCQPKCEWTEWFDVDFPTSGVAGGDMETFENIRAAGGKMCWAPKSIECRAENYPEVSIDQVGQVLTCSLETGLTCKNEDQTGRFNMCFNYNVRVLCCDDYSHCPSTPATSSTATPSSTPGTTWILTKPTTTATTTASTGSTATPTSTLRTAPPPKVLTTTATTPTVTSSKATPSSSPGTATALPALRSTATTPTATSVTPIPSSSLGTTWTRLSQTTTPTATMSTATPSSTPETAHTSTVLTATATTTGATGSVATPSSTPGTAHTTKVPTTTTTGFTATPSSSPGTALTPPVWISTTTTPTTRGSTVTPSSIPGTTHTATVLTTTTTTVATGSMATPSSSTQTSGTPPSLTTTATTITATGSTTNPSSTPGTTPIPPVLTTTATTPAATSNTVTPSSALGTTHTPPVPNTMATTHGRSLPPSSPHTVRTAWTSATSGILGTTHITEPSTVTSHTLAATTGTTQHSTPALSSPHPSSRTTESPPSPGTTTPGHTTATSRTTATATPSKTRTSTLLPSSPTSAPITTVVTMGCEPQCAWSEWLDYSYPMPGPSGGDFDTYSNIRAAGGAVCEQPLGLECRAQAQPGVPLRELGQVVECSLDFGLVCRNREQVGKFKMCFNYEIRVFCCNYGHCPSTPATSSTAMPSSTPGTTWILTELTTTATTTESTGSTATPSSTPGTTWILTEPSTTATVTVPTGSTATASSTQATAGTPHVSTTATTPTVTSSKATPFSSPGTATALPALRSTATTPTATSFTAIPSSSLGTTWTRLSQTTTPTATMSTATPSSTPETVHTSTVLTTTATTTGATGSVATPSSTPGTAHTTKVLTTTTTGFTATPSSSPGTARTLPVWISTTTTPTTRGSTVTPSSIPGTTHTPTVLTTTTTTVATGSMATPSSSTQTSGTPPSLTTTATTITATGSTTNPSSTPGTTPIPPVLTTTATTPAATSSTVTPSSALGTTHTPPVPNTTATTHGRSLSPSSPHTVRTAWTSATSGTLGTTHITEPSTGTSHTPAATTGTTQHSTPALSSPHPSSRTTESPPSPGTTTPGHTRATSRTTATATPSKTRTSTLLPSSPTSAPITTVVTMGCEPQCAWSEWLDYSYPMPGPSGGDFDTYSNIRAAGGAVCEQPLGLECRAQAQPGVPLRELGQVVECSLDFGLVCRNREQVGKFKMCFNYEIRVFCCNYGHCPSTPATSSTATPSSTPGTTWILTEQTTAATTTATTGSTAIPSSTPGTAPPPKVLTSTATTPTATSSKATSSSSPRTATTLPVLTSTATKSTATSFTPIPSFTLGTTGTLPEQTTTPMATMSTIHPSSTPETTHTSTVLTTKATTTRATSSMSTPSSTPGTTWILTELTTAATTTAATGPTATPSSTPGTTWILTEPSTTATVTVPTGSTATASSTRATAGTLKVLTSTATTPTVISSRATPSSSPGTATALPALRSTATTPTATSVTAIPSSSLGTAWTRLSQTTTPTATMSTATPSSTPETVHTSTVLTTTTTTTRATGSVATPSSTPGTAHTTKVPTTTTTGFTATPSSSPGTALTPPVWISTTTTPTTRGSTVTPSSIPGTTHTATVLTTTTTTVATGSMATPSSSTQTSGTTHTPPVPNTTATTHGRSLPPSSPHTVRTAWTSATSGILGTTHITEPSTVTSHTPAATTSTTQHSTPALSSPHPSSRTTESPPSPGTTTPGHTRGTSRTTATATPSKTRTSTLLPSSPTSAPITTVVTTGCEPQCAWSEWLDYSYPMPGPSGGDFDTYSNIRAAGGAVCEQPLGLECRAQAQPGVPLRELGQVVECSLDFGLVCRNREQVGKFKMCFNYEIRVFCCNYGHCPSTPATSSTATPSSTPGTTWILTKLTTTATTTESTGSTATPSSTPGTTWILTEPSTTATVTVPTGSTATASSTQATAGTPHVSTTATTPTVTSSKATPFSSPGTATALPALRSTATTPTATSFTAIPSSSLGTTWTRLSQTTTPTATMSTATPSSTPETAHTSTVLTTTATTTRATGSVATPSSTPGTAHTTKVPTTTTTGFTVTPSSSPGTARTPPVWISTTTTPTTSGSTVTPSSVPGTTHTPTVLTTTTTTVATGSMATPSSSTQTSGTPPSLITTATTITATGSTTNPSSTPGTTPIPPVLTTTATTPAATSSTVTPSSALGTTHTPPVPNTTATTHGRSLSPSSPHTVRTAWTSATSGTLGTTHITEPSTGTSHTPAATTGTTQHSTPALSSPHPSSRTTESPPSPGTTTPGHTTATSRTTATATPSKTRTSTLLPSSPTSAPITTVVTTGCEPQCAWSEWLDYSYPMPGPSGGDFDTYSNIRAAGGAVCEQPLGLECRAQAQPGVPLGELGQVVECSLDFGLVCRNREQVGKFKMCFNYEIRVFCCNYGHCPSTPATSSTAMPSSTPGTTWILTELTTTATTTASTGSTATPSSTPGTAPPPKVLTSPATTPTATSSKATSSSSPRTATTLPVLTSTATKSTATSVTPIPSSTLGTTGTLPEQTTTPVATMSTIHPSSTPETTHTSTVLTTKATTTRATSSTSTPSSTPGTTWILTELTTAATTTAATGPTATPSSTPGTTWILTELTTTATTTASTGSTATPSSTPGTTWILTEPSTTATVTVPTGSTATASSTQATAGTPHVSTTATTPTVTSSKATPSSSPGTATALPALRSTATTPTATSFTAIPSSSLGTTWTRLSQTTTPTATMSTATPSSTPETVHTSTVLTATATTTGATGSVATPSSTPGTAHTTKVPTTTTTGFTATPSSSPGTALTPPVWISTTTTPTTTTPTTSGSTVTPSSIPGTTHTARVLTTTTTTVATGSMATPSSSTQTSGTPPSLTTTATTITATGSTTNPSSTPGTTPITPVLTSTATTPAATSSKATSSSSPRTATTLPVLTSTATKSTATSFTPIPSSTLWTTWTVPAQTTTPMSTMSTIHTSSTPETTHTSTVLTTTATMTRATNSTATPSSTLGTTRILTELTTTATTTAATGSTATLSSTPGTTWILTEPSTIATVMVPTGSTATASSTLGTAHTPKVVTTMATMPTATASTVPSSSTVGTTRTPAVLPSSLPTFSVSTVSSSVLTTLRPTGFPSSHFSTPCFCRAFGQFFSPGEVIYNKTDRAGCHFYAVCNQHCDIDRFQGACPTSPPPVSSAPLSSPSPAPGCDNAIPLRQVNETWTLENCTVARCVGDNRVVLLDPKPVANVTCVNKHLPIKVSDPSQPCDFHYECECICSMWGGSHYSTFDGTSYTFRGNCTYVLMREIHARFGNLSLYLDNHYCTASATAAAARCPRALSIHYKSMDIVLTVTMVHGKEEGLILFDQIPVSSGFSKNGVLVSVLGTTTMRVDIPALGVSVTFNGQVFQARLPYSLFHNNTEGQCGTCTNNQRDDCLQRDGTTAASCKDMAKTWLVPDSRKDGCWAPTGTPPTASPAAPVSSTPTPTPCPPQPLCDLMLSQVFAECHNLVPPGPFFNACISDHCRGRLEVPCQSLEAYAELCRARGVCSDWRGATGGLCDLTCPPTKVYKPCGPIQPATCNSRNQSPQLEGMAEGCFCPEDQILFNAHMGICVQACPCVGPDGFPKFPGERWVSNCQSCVCDEGSVSVQCKPLPCDAQGQPPPCNRPGFVTVTRPRAENPCCPETVCVCNTTTCPQSLPVCPPGQESICTQEEGDCCPTFRCRPQLCSYNGTFYGVGATFPGALPCHMCTCLSGDTQDPTVQCQEDACNNTTCPQGFEYKRVAGQCCGECVQTACLTPDGQPVQLNETWVNSHVDNCTVYLCEAEGGVHLLTPQPASCPDVSSCRGSLRKTGCCYSCEEDSCQVRINTTILWHQGCETEVNITFCEGSCPGASKYSAEAQAMQHQCTCCQERRVHEETVPLHCPNGSAILHTYTHVDECGCTPFCVPAPMAPPHTRGFPAQEATAV

SEQ ID NO: 83 - protein, 619 aa, Homo sapiens
MAAVVQQNDLVFEFASNVMEDERQLGDPAIFPAVIVEHVPGADILNSYAGLACVEEPNDMITESSLDVAEEEIIDDDDDDITLTVEASCHDGDETIETIEAAEALLNMDSPGPMLDEKRINNNIFSSPEDDMVVAPVTHVSVTLDGIPEVMETQQVQEKYADSPGASSPEQPKRKKGRKTKPPRPDSPATTPNISVKKKNKDGKGNTIYLWEFLLALLQDKATCPKYIKWTQREKGIFKLVDSKAVSRLWGKHKNKPDMNYETMGRALRYYYQRGILAKVEGQRLVYQFKEMPKDLIYINDEDPSSSIESSDPSLSSSATSNRNQTSRSRVSSSPGVKGGATTVLKPGNSKAAKPKDPVEVAQPSEVLRTVQPTQSPYPTQLFRTVHVVQPVQAVPEGEAARTSTMQDETLNSSVQSIRTIQAPTQVPVVVSPRNQQLHTVTLQTVPLTTVIASTDPSAGTGSQKFILQAIPSSQPMTVLKENVMLQSQKAGSPPSIVLGPAQVQQVLTSNVQTICNGTVSVASSPSFSATAPVVTFSPRSSQLVAHPPGTVITSVIKTQETKTLTQEVEKKESEDHLKENTEKTEQQPQPYVMVVSSSNGFTSQVAMKQNELLEPNSF

SEQ ID NO: 84 - protein, 753 aa, Homo sapiens
MGEHSPDNNIIYFEAEEDELTPDDKMLRFVDKNGLVPSSSGTVYDRTTVLIEQDPGTLEDEDDDGQCGEHLPFLVGGEEGFHLIDHEAMSQGYVQHIISPDQIHLTINPGSTPMPRNIEGATLTLQSECPETKRKEVKRYQCTFEGCPRTYSTAGNLRTHQKTHRGEYTFVCNQEGCGKAFLTSHSLRIHVRVHTKEKPFECDVQGCEKAFNTLYRLKAHQRLHTGKTFNCESEGCSKYFTTLSDLRKHIRTHTGEKPFRCDHDGCGKAFAASHHLKTHVRTHTGERPFFCPSNGCEKTFSTQYSLKSHMKGHDNKGHSYNALPQHNGSEDTNHSLCLSDLSLLSTDSELRENSSTTQGQDLSTISPAIIFESMFQNSDDTAIQEDPQQTASLTESFNGDAESVSDVPPSTGNSASLSLPLVLQPGLSEPPQPLLPASAPSAPPPAPSLGPGSQQAAFGNPPALLQPPEVPVPHSTQFAANHQEFLPHPQAPQPIVPGLSVVAGASASAAAVASAVAAPAPPQSTTEPLPAMVQTLPLGANSVLTNNPTITITPTPNTAILQSSLVMGEQNLQWILNGATSSPQNQEQIQQASKVEKVFFTTAVPVASSPGSSVQQIGLSVPVIIIKQEEACQCQCACRDSAKERASSRRKGCSSPPPPEPSPQAPDGPSLQLPAQTFSSAPVPGSSSSTLPSSCEQSRQAETPSDPQTETLSAMDVSEFLSLQSLDTPSNLIPIEALLQGEEEMGLTSSFSK

SEQ ID NO: 85 - protein, 57 aa, Homo sapiens
MLCAHFSDQGPAHLTTSKSAFLSNKKTSTLKHLLGETRSDGSACNSGISGGRGRKIP

SEQ ID NO: 86 - protein, 726 aa, Homo sapiens
MEGERKNNNKRWYFTREQLENSPSRRFGVDPDKELSYRQQAANLLQDMGQRLNVSQLTINTAIVYMHRFYMIQSFTQFPGNSVAPAALFLAAKVEEQPKKLEHVIKVAHTCLHPQESLPDTRSEAYLQQVQDLVILESIILQTLGFELTIDHPHTHVVKCTQLVRASKDLAQTSYFMATNSLHLTTFSLQYTPPVVACVCIHLACKWSNWEIPVSTDGKHWWEYVDATVTLELLDELTHEFLQILEKTPNRLKRIWNWRACEAAKKTKADDRGTDEKTSEQTILNMISQSSSDTTIAGLMSMSTSTTSAVPSLPVSEESSSNLTSVEMLPGKRWLSSQPSFKLEPTQGHRTSENLALTGVDHSLPQDGSNAFISQKQNSKSVPSAKVSLKEYRAKHAEELAAQKRQLENMEANVKSQYAYAAQNLLSHHDSHSSVILKMPIEGSENPERPFLEKADKTALKMRIPVAGGDKAASSKPEEIKMRIKVHAAADKHNSVEDSVTKSREHKEKHKTHPSNHHHHHNHHSHKHSHSQLPVGTGNKRPGDPKHSSQTSNLAHKTYSLSSSFSSSSSTRKRGPSEETGGAVFDHPAKIAKSTKSSSLNFSFPSLPTMGQMPGHSSDTSGLSFSQPSCKTRVPHSKLDKGPTGANGHNTTQTIDYQDTVNMLHSLLSAQGVQPTQPTAFEFVRPYSDYLNPRSGGISSRSGNTDKPRPPPLPSEPPPPLPPLPK

SEQ ID NO: 87 - protein, 591 aa, Homo sapiens
MYLKDYERKVILEKAGKYVDEENSDGETSNHRLQETSSQSYVEEQKQLKESFRAFVEDSEDEDGAGEGGSSLLQKRAKTRQEKAQEEADYIEWLKGQKEIRNPDSLKELTHLKEYWNDPELDEGERFLRDYILNKRYEEEEEEEEDEEEMEEEKGVHGPPVQLAVDDSSDEGELFLKKQEDFEQKYNFRFEEPDSASVKTYPRSIASSVRRKDERRKEKREETRERKKREKAKKQEELKQLKNLKRKEILAKLEKLRKVTGNEMLGLEEGDLEDDFDPAQHDQLMQKCFGDEYYGAVEEEKPQFEEEEGLEDDWNWDTWDGPEQEGDWSQQELHCEDPNFNMDADYDPSQPRKKKREAPLTGKKKRKSPFAAAVGQEKPVFEPGDKTFEEYLDEYYRLDYEDIIDDLPCRFKYRTVVPCDFGLSTEEILAADDKELNRWCSLKKTCMYRSEQEELRDKRAYSQKAQNSWKKRQVFKSLCREEAETPAEATGKPQRDEAGPQRQLPALDGSLMGPESPPAQEEEAPVSPHKKPAPQKRRRAKKARLLGPTVMLGGCEFSRQRLQAFGLNPKRLHFRQLGRQRRKQQGPKNSS

SEQ ID NO: 88 - protein, 709 aa, Homo sapiens
MGHRTAMPEPRGSSQLRVNAAFAARYNRYREREELQRLKDRYGDRDSSSDSSSESDSSDERVEFDPQQERDFYKTLSLLKKKDPRIYQKDATFYNRTASSSDSEEDPEALEKQKKVRPMYLKDYERKVILEKAGKYVDEENSDGETSNHRLQETSSQSYVEEQKQLKESFRAFVEDSEDEDGAGEGGSSLLQKRAKTRQEKAQEEADYIEWLKGQKEIRNPDSLKELTHLKEYWNDPELDEGERFLRDYILNKRYEEEEEEEEDEEEMEEEKGVHGPPVQLAVDDSSDEGELFLKKQEDFEQKYNFRFEEPDSASVKTYPRSIASSVRRKDERRKEKREETRERKKREKAKKQEELKQLKNLKRKEILAKLEKLRKVTGNEMLGLEEGDLEDDFDPAQHDQLMQKCFGDEYYGAVEEEKPQFEEEEGLEDDWNWDTWDGPEQEGDWSQQELHCEDPNFNMDADYDPSQPRKKKREAPLTGKKKRKSPFAAAVGQEKPVFEPGDKTFEEYLDEYYRLDYEDIIDDLPCRFKYRTVVPCDFGLSTEEILAADDKELNRWCSLKKTCMYRSEQEELRDKRAYSQKAQNSWKKRQVFKSLCREEAETPAEATGKPQRDEAGPQRQLPALDGSLMGPESPPAQEEEAPVSPHKKPAPQKRRRAKKARLLGPTVMLGGCEFSRQRLQAFGLNPKRLHFRQLGRQRRKQQGPKNSS

SEQ ID NO: 89 - protein, 1198 aa, Homo sapiens
MAPVYEGMASHVQVFSPHTLQSSAFCSVKKLKVEPSSNWDMTGYGSHSKVYSQSKNIPPSQPASTTVSTSLPVPNPSLPYEQTIVFPGSTGHIVVTSASSTSVTGQVLGGPHNLMRRSTVSLLDTYQKCGLKRKSEEIENTSSVQIIEEHPPMIQNNASGATVATATTSTATSKNSGSNSEGDYQLVQHEVLCSMTNTYEVLEFLGRGTFGQVVKCWKRGTNEIVAIKILKNRPSYARQGQIEVSILARLSTESADDYNFVRAYECFQHKNHTCLVFEMLEQNLYDFLKQNKFSPLPLKYIRPVLQQVATALMKLKSLGLIHADLKPENIMLVDPSRQPYRVKVIDFGSASHVSKAVCSTYLQSRYYRAPEIILGLPFCEAIDMWSLGCVIAELFLGWPLYPGASEYDQIRYISQTQGLPAEYLLSAGTKTTRFFNRDTDSPYPLWRLKTPDDHEAETGIKSKEARKYIFNCLDDMAQVNMTTDLEGSDMLVEKADRREFIDLLKKMLTIDADKRITPIETLNHPFVTMTHLLDFPHSTHVKSCFQNMEICKRRVNMYDTVNQSKTPFITHVAPSTSTNLTMTFNNQLTTVHNQAPSSTSATISLANPEVSILNYPSTLYQPSAASMAAVAQRSMPLQTGTAQICARPDPFQQALIVCPPGFQGLQASPSKHAGYSVRMENAVPIVTQAPGAQPLQIQPGLLAQQAWPSGTQQILLPPAWQQLTGVATHTSVQHATVIPETMAGTQQLADWRNTHAHGSHYNPIMQQPALLTGHVTLPAAQPLNVGVAHVMRQQPTSTTSSRKSKQHQSSVRNVSTCEVSSSQAISSPQRSKRVKENTPPRCAMVHSSPACSTSVTCGWGDVASSTTRERQRQTIVIPDTPSPTVSVITISSDTDEEEEQKHAPTSTVSKQRKNVISCVTVHDSPYSDSSSNTSPYSVQQRAGHNNANAFDTKGSLENHCTGNPRTIIVPPLKTQASEVLVECDSLVPVNTSHHSSSYKSKSSSNVTSTSGHSSGSSSGAITYRQQRPGPHFQQQQPLNLSQAQQHITTDRTGSHRRQQAYITPTMAQAPYSFPHNSPSHGTVHPHLAAAAAAAHLPTQPHLYTYTAPAALGSTGTVAHLVASQGSARHTVQHTAYPASIVHQVPVSMGPRVLPSPTIHPSQYPAQFAHQTYISASPASTVYTGYPLSPAKVNQYPYI

SEQ ID NO: 90 - protein, 1022 aa, Homo sapiens
MRVQLLQDLQDFFRKKAEIETEYSRNLEKLAERFMAKTRSTKDHQQYKKDQNLLSPVNCWYLLLNQVRRESKDHATLSDIYLNNVIMRFMQISEDSTRMFKKSKEIAFQLHEDLMKVLNELYTVMKTYHMYHAESISAESKLKEAEKQEEKQIGRSGDPVFHIRLEERHQRRSSVKKIEKMKEKRQAKYSENKLKSIKARNEYLLTLEATNASVFKYYIHDLSDLIDCCDLGYHASLNRALRTYLSAEYNLETSRHEGLDIIENAVDNLEPRSDKQRFMEMYPAAFCPPMKFEFQSHMGDEVCQVSAQQPVQAELMLRYQQLQSRLATLKIENEEVKKTTEATLQTIQDMVTIEDYDVSECFQHSRSTESVKSTVSETYLSKPSIAKRRANQQETEQFYFMKLREYLEGSNLITKLQAKHDLLQRTLGEGHRAEYMTTSRGRRNSHTRHQDSGQVIPLIVESCIRFINLYGLQHQGIFRVSGSQVEVNDIKNSFERGENPLADDQSNHDINSVAGVLKLYFRGLENPLFPKERFNDLISCIRIDNLYERALHIRKLLLTLPRSVLIVMRYLFAFLNHLSQYSDENMMDPYNLAICFGPTLMPVPEIQDQVSCQAHVNEIIKTIIIHHETIFPDAKELDGPVYEKCMAGDDYCDSPYSEHGTLEEVDQDAGTEPHTSEDECEPIEAIAKFDYVGRSARELSFKKGASLLLYHRASEDWWEGRHNGIDGLVPHQYIVVQDMDDTFSDTLSQKADSEASSGPVTEDKSSSKDMNSPTDRHPDGYLARQRKRGEPPPPVRRPGRTSDGHCPLHPPHALSNSSVDLGSPSLASHPRGLLQNRGLNNDSPERRRRPGHGSLTNISRHDSLKKIDSPPIRRSTSSGQYTGFNDHKPLDPETIAQDIEETMNTALNELRELERQSTAKHAPDVVLDTLEQVKNSPTPATSTESLSPLHNVALRSSEPQIRRSTSSSSDTMSTFKPMVAPRMGVQLKPPALRPKPAVLPKTNPTIGPAPPPQGPTDKSCTM

SEQ ID NO: 91 - protein, 581 aa, Homo sapiens
MAASGRGLCKAVAASPFPAWRRDNTEARGGLKPEYDAVVIGAGHNGLVAAAYLQRLGVNTAVFERRHVIGGAAVTEEIIPGFKFSRASYLLSLLRPQIYTDLELKKHGLRLHLRNPYSFTPMLEEGAGSKVPRCLLLGTDMAENQKQIAQFSQKDAQVFPKYEEFMHRLALAIDPLLDAAPVDMAAFQHGSLLQRMRSLSTLKPLLKAGRILGAQLPRYYEVLTAPITKVLDQWFESEPLKATLATDAVIGAMTSPHTPGSGYVLLHHVMGGLEGMQGAWGYVQGGMGALSDAIASSATTHGASIFTEKTVAKVQVNSEGCVQGVVLEDGTEVRSKMVLSNTSPQITFLKLTPQEWLPEEFLERISQLDTRSPVTKINVAVDRLPSFLAAPNAPRGQPLPHHQCSIHLNCEDTLLLHQAFEDAMDGLSSHRPVIELCIPSSLDPTLAPPGCHVVSLFTQYTPYTLAGGKAWDEQERDAYADRVFDCIEVYAPGFKDSVVGRDILTPPDLERIFGLPGGNIFHCAMSLDQLYFARPVPLHSGYRCPLQGLYLCGSGAHPGGGVMGAAGRNAAHVAFRDLKSM

SEQ ID NO: 92 - protein, 498 aa, Homo sapiens
MPLVTRNIEPRHLCRQTLPSVRSELECVTNITLANVIRQLGSLSKYAEDIFGELFTQANTFASRVSSLAERVDRLQVKVTQLDPKEEEVSLQGINTRKAFRSSTIQDQKLFDRNSLPVPVLETYNTCDTPPPLNNLTPYRDDGKEALKFYTDPSYFFDLWKEKMLQDTKDIMKEKRKHRKEKKDNPNRGNVNPRKIKTRKEEWEKMKMGQEFVESKEKLGTSGYPPTLVYQNGSIGCVENVDASSYPPPPQSDSASSPSPSFSEDNLPPPPAEFSYPVDNQRGSGLAGPKRSSVVSPSHPPPAPPLGSPPGPKPGFAPPPAPPPPPPPMIGIPPPPPPVGFGSPGTPPPPSPPSFPPHPDFAAPPPPPPPPAADYPTLPPPPLSQPTGGAPPPPPPPPPPGPPPPPFTGADGQPAIPPPLSDTTKPKSSLPAVSDARSDLLSAIRQGFQLRRVEEQREQEKRDVVGNDVATILSRRIAVEYSDSEDDSSEFDEDDWSD

SEQ ID NO: 93 - protein, 1138 aa, Homo sapiens
MALKMVKGSIDRMFDKNLQDLVRGIRNHKEDEAKYISQCIDEIKQELKQDNIAVKANAVCKLTYLQMLGYDISWAAFNIIEVMSASKFTFKRIGYLAASQSFHEGTDVIMLTTNQIRKDLSSPSQYDTGVALTGLSCFVTPDLARDLANDIMTLMSHTKPYIRKKAVLIMYKVFLKYPESLRPAFPRLKEKLEDPDPGVQSAAVNVICELARRNPKNYLSLAPLFFKLMTSSTNNWVLIKIIKLFGALTPLEPRLGKKLIEPLTNLIHSTSAMSLLYECVNTVIAVLISLSSGMPNHSASIQLCVQKLRILIEDSDQNLKYLGLLAMSKILKTHPKSVQSHKDLILQCLDDKDESIRLRALDLLYGMVSKKNLMEIVKKLMTHVDKAEGTTYRDELLTKIIDICSQSNYQYITNFEWYISILVELTRLEGTRHGHLIAAQMLDVAIRVKAIRKFAVSQMSALLDSAHLLASSTQRNGICEVLYAAAWICGEFSEHLQEPHHTLEAMLRPRVTTLPGHIQAVYVQNVVKLYASILQQKEQAGEAEGAQAVTQLMVDRLPQFVQSADLEVQERASCILQLVKHIQKLQAKDVPVAEEVSALFAGELNPVAPKAQKKVPVPEGLDLDAWINEPLSDSESEDERPRAVFHEEEQRRPKHRPSEADEEELARRREARKQEQANNPFYIKSSPSPQKRYQDTPGVEHIPVVQIDLSVPLKVPGLPMSDQYVKLEEERRHRQKLEKDKRRKKRKEKEKKGKRRHSSLPTESDEDIAPAQQVDIVTEEMPENALPSDEDDKDPNDPYRALDIDLDKPLADSEKLPIQKHRNTETSKSPEKDVPMVEKKSKKPKKKEKKHKEKERDKEKKKEKEKKKSPKPKKKKHRKEKEERTKGKKKSKKQPPGSEEAAGEPVQNGAPEEEQLPPESSYSLLAENSYVKMTCDIRGSLQEDSQVTVAIVLENRSSSILKGMELSVLDSLNARMARPQGSSVHDGVPVPFQLPPGVSNEAQYVFTIQSIVMAQKLKGTLSFIAKNDEGATHEKLDFRLHFSCSSYLITTPCYSDAFAKLLESGDLSMSSIKVDGIRMSFQNLLAKICFHHHFSVVERVDSCASMYSRSIQGHHVCLLVKKVRTLSQSTGSAVTPRY

SEQ ID NO: 94 - protein, 227 aa, Homo sapiens
MFEPVSCTFTYLLGDGESREAVLIDPVLETAPRDAQLIKELGLRLLYAVNTHCHADHITGSGLLRSLLPGCQSVISRLSGAQADLHIEDGDSIRFGRFALETRASPGHTPGCVTFVLNDHSMAFTGDALLIRGCGRTDFQQGCAKTLYHSVHEKIFTLPGDCLIYPAHDYHGFTVSTVEEERTLNPRLTLSCEEFVKIMGNLNLPKPQQIDFAVPANMRCGVQTPTA

SEQ ID NO: 95 - protein, 640 aa, Homo sapiens
MHVKKYLLKGLHRLQKGPGYTYKELLVWYCDNTNTHGPKRIICEGPKKKAMWFLLTLLFAALVCWQWGIFIRTYLSWEVSVSLSVGFKTMDFPAVTICNASPFKYSKIKHLLKDLDELMEAVLERILAPELSHANATRNLNFSIWNHTPLVLIDERNPHHPMVLDLFGDNHNGLTSSSASEKICNAHGCKMAMRLCSLNRTQCTFRNFTSATQALTEWYILQATNIFAQVPQQELVEMSYPGEQMILACLFGAEPCNYRNFTSIFYPHYGNCYIFNWGMTEKALPSANPGTEFGLKLILDIGQEDYVPFLASTGGVRLMLHEQRSYPFIRDEGIYAMSGTETSIGVLVDKLQRMGEPYSPCTVNGSEVPVQNFYSDYNTTYSIQACLRSCFQDHMIRNCNCGHYLYPLPRGEKYCNNRDFPDWAHCYSDLQMSVAQRETCIGMCKESCNDTQYKMTISMADWPSEASEDWIFHVLSQERDQSTNITLSRKGIVKLNIYFQEFNYRTIEESAANNIVWLLSNLGGQFGFWMGGSVLCLIEFGEIIIDFVWITIIKLVALAKSLRQRRAQASYAGPPPTVAELVEAHTNFGFQPDTAPRSPNTGPYPSEQALPIPGTPPPNYDSLRLQPLDVIESDSEGDAI

SEQ ID NO: 96 - protein, 1498 aa, Homo sapiens
VKDLGSLNGTFVNDMRIPDQKYVTLKLNDVIRFGYDSNMYVLERVQHRVPEEALKHEKYTSQLQVSVKGLAPKRSEALPEHTPYCEASNPRPEKGDRRPGTEAASYRTPLYGQPSWWGEDDGSTLPDAQRQGEPYPERPKGPVQQDGELHGFRAPAEPQGCSFRREPSYFEIPTKETPQPSQPPEVPAHEMPTKDAEAGGGGAAPVVQSHASFTIEFDDCSPGKMKIKDHITKFSLRQRRPPGKEATPGEMVSAETKVADWLVQNDPSLLHRVGPGDDRHSTKSDLPVHTRTLKGHKHEDGTQSDSEDPLAKAASAAGVPLEASGGQVRLQRQIKRDPQELLHNQQAFVIEFFDEDTPRKKRSQSFTHSPSGDPKADKRRGPTPADRDRPSVPAPVQAGGRSSGPQRAGSLKREKTEERLGSPSPASRTPARPFGSVGRRSRLAQDFMAQCLRESSPAARPSPEKVPPVLPAPLTPHGTSPVGPPTPPPAPTDPQLTKARKQEEDDSLSDAGTYTIETEAQDTEVEEARKMIDQVFGVLESPELSRASSATFRPVIRGDRDESDDGGVAQRMALLQEFASRPLGAAPQAEHQGLPVPGSPGGQKWVSRWASLADSYSDPGLTEDGLGRRGGEPEGSLPVRMRRRLPQLPSERADSPAGPESSRRSGPGPPELDSEQPSRLFGQEELDPDSLSDASGSDGGRGPEPGVEPQDSRRRSPQEGPTWSRGRRSPRAPGEPTPASFFIGDQNGDAVLSRKLLAAPGDGEGLGQTAQPSPPARDGVYVSANGRMVIQLRPGRSPEPDGPAPAFLRQESFTKEPASGPPAPGKPPHISSHPLLQDLAATRAARMDFHSQDTHLILKETETALAALEARLLSNSVDAECEGGSTPRPPEDALSGDSDVDTASTVSLRSGKSGPSPTTPQPLRAQKEMSPSPPAAQDPGGTALVSAREQSSERQHHPLGPTDMGRGEPVRRSAIRRGHRPRGSLDWPSEERGPVLAHLPSSDVMASNHETPEATGAGRLGSRRKPAAPPPSPAAREEQSRSSASSQKGPQALTRSNSLSTPRPTRASRLRRARLGDASDTEAADGERGSLGNPEPVGRPAAEQAKKLSRLDILAMPRKRAGSFTGTSDPEAAPARTSFSGRSVELCCASRKPTMAEARAVSRKAANTATTTGPRQPFSRARSGSARYTSTTQTPRAGSSSRARSRAPGPRDTDDDEEEPDPYGFIVQTAEIAEIARLSQTLVKDVAILAQEIHDVAGDGDTLGSSEPAHSASLSNMPSTPASTISAREELVQRIPEASLNFQKVPPGSLNSRDFDQNMNDSCEDALANKTRPRNREEVIFDNLMLNPVSQLSQAIRENTEHLAEKMKILFQNTGRAWEDLEARINAENEVPILKTSNKEISSILKELRRVQKQLEVINAIVDPSGSLDLLTGNRSLASSAQPGLGKGRVAAQSPPSPASAEALLPALPLRNFPQRASCGPPSLPDPTFLPDAERFLI

SEQ ID NO: 97 - protein, 622 aa, Homo sapiens
MAMAPSPSLVQVYTSPAAVAVWEWQDGLGTWHPYSATVCSFIEQQFVQQKGQRFGLGSLAHSIPLGQADPSLAPYIIDLPSWTQFRQDTGTMRAVRRHLFPQHSAPGRGVVWEWLSDDGSWTAYEASVCDYLEQQVARGNQLVDLAPLGYNYTVNYTTHTQTNKTSSFCRSVRRQAGPPYPVTTIIAPPGHTGVACSCHQCLSGSRTGPVSGRYRHSMTNLPAYPVPQHPPHRTASVFGTHQAFAPYNKPSLSGARSAPRLNTTNAWGAAPPSLGSQPLYRSSLSHLGPQHLPPGSSTSGAVSASLPSGPSSSPGSVPATVPMQMPKPSRVQQALAGMTSVLMSAIGLPVCLSRAPQPTSPPASRLASKSHGSVKRLRKMSVKGATPKPEPEPEQVIKNYTEELKVPPDEDCIICMEKLSAASGYSDVTDSKAIGSLAVGHLTKCSHAFHLLCLLAMYCNGNKDGSLQCPSCKTIYGEKTGTQPQGKMEVLRFQMSLPGHEDCGTILIVYSIPHGIQGPEHPNPGKPFTARGFPRQCYLPDNAQGRKVLELLKVAWKRRLIFTVGTSSTTGETDTVVWNEIHHKTEMDRNITGHGYPDPNYLQNVLAELAAQGVTEDCLEQQ

SEQ ID NO: 98 - protein, 568 aa, Homo sapiens
MASSCAVQVKLELGHRAQVRKKPTVEGFTHDWMVFVRGPEHSNIQHFVEKVVFHLHESFPRPKRVCKDPPYKVEESGYAGFILPIEVYFKNKEEPRKVRFDYDLFLHLEGHPPVNHLRCEKLTFNNPTEDFRRKLLKAGGDPNRSIHTSSSSSSSSSSSSSSSSSSSSSSSSGSSSSSSSSSSSSSSSSSTSFSKPHKLMKEHKEKPSKDSREHKSAFKEPSRDHNKSSKESSKKPKENKPLKEEKIVPKMAFKEPKPMSKEPKPDSNLLTITSGQDKKAPSKRPPISDSEELSAKKRKKSSSEALFKSFSSAPPLILTCSADKKQIKDKSHVKMGKVKIESETSEKKKSTLPPFDDIVDPNDSDVEENISSKSDSEQPSPASSSSSSSSSFTPSQTRQQGPLRSIMKDLHSDDNEEESDEVEDNDNDSEMERPVNRGGSRSRRVSLSDGSDSESSSASSPLHHEPPPPLLKTNNNQILEVKSPIKQSKSDKQIKNGECDKAYLDELVELHRRLMTLRERHILQQIVNLIEETGHFHITNTTFDFDLCSLDKTTVRKLQSYLETSGTS

SEQ ID NO: 99 - protein, 373 aa, Homo sapiens
MLLGLAAMELKVWVDGIQRVVCGVSEQTTCQEVVIALAQAIGQTGRFVLVQRLREKERQLLPQECPVGAQATCGQFASDVQFVLRRTGPSLAGRPSSDSCPPPERCLIRASLPVKPRAALGCEPRKTLTPEPAPSLSRPGPAAPVTPTPGCCTDLRGLELRVQRNAEELGHEAFWEQELRREQAREREGQARLQALSAATAEHAARLQALDAQARALEAELQLAAEAPGPPSPMASATERLHQDLAVQERQSAEVQGSLALVSRALEAAERALQAQAQELEELNRELRQCNLQQFIQQTGAALPPPPRPDRGPPGTQGPLPPAREESLLGAPSESHAGAQPRPRGGPHDAELLEVAAAPAPEWCPLAAQPQAL

SEQ ID NO: 100 - protein, 334 aa, Homo sapiens
MKPPPRRRAAPARYLGEVTGPATWSAREKRQLVRLLQARQGQPEPDATELARELRGRSEAEIRVFLQQLKGRVAREAIQKVHPGGLQGPRRREAQPPAPIEVWTDLAEKITGPLEEALAVAFSQVLTIAATEPVTLLHSKPPKPTQARGKPLLLSAPGGQEDPAPEIPSSAPAAPSSAPRTPDPAPEKPSESSAGPSTEEDFAVDFEKIYKYLSSVSRSGRSPELSAAESAVVLDLLMSLPEELPLLPCTALVEHMTETYLRLTAPQPIPAGGSLGPAAEGDGAGSKAPEETPPATEKAEHSELKSPWQAAGICPLNPFLVPLELLGRAATPAR

SEQ ID NO: 101 - protein, 1233 aa, Homo sapiens
MGFLKLIEIENFKSYKGRQIIGPFQRFTAIIGPNGSGKSNLMDAISFVLGEKTSNLRVKTLRDLIHGAPVGKPAANRAFVSMVYSEEGAEDRTFARVIVGGSSEYKINNKVVQLHEYSEELEKLGILIKARNFLVFQGAVESIAMKNPKERTALFEEISRSGELAQEYDKRKKEMVKAEEDTQFNYHRKKNIAAERKEAKQEKEEADRYQRLKDEVVRAQVQLQLFKLYHNEVEIEKLNKELASKNKEIEKDKKRMDKVEDELKEKKKELGKMMREQQQIEKEIKEKDSELNQKRPQYIKAKENTSHKIKKLEAAKKSLQNAQKHYKKRKGDMDELEKEMLSVEKARQEFEERMEEESQSQGRDLTLEENQVKKYHRLKEEASKRAATLAQELEKFNRDQKADQDRLDLEERKKVETEAKIKQKLREIEENQKRIEKLEEYITTSKQSLEEQKKLEGELTEEVEMAKRRIDEINKELNQVMEQLGDARIDRQESSRQQRKAEIMESIKRLYPGSVYGRLIDLCQPTQKKYQIAVTKVLGKNMDAIIVDSEKTGRDCIQYIKEQRGEPETFLPLDYLEVKPTDEKLRELKGAKLVIDVIRYEPPHIKKALQYACGNALVCDNVEDARRIAFGGHQRHKTVALDGTLFQKSGVISGGASDLKAKARRWDEKAVDKLKEKKERLTEELKEQMKAKRKEAELRQVQSQAHGLQMRLKYSQSDLEQTKTRHLALNLQEKSKLESELANFGPRINDIKRIIQSREREMKDLKEKMNQVEDEVFEEFCREIGVRNIREFEEEKVKRQNEIAKKRLEFENQKTRLGIQLDFEKNQLKEDQDKVHMWEQTVKKDENEIEKLKKEEQRHMKIIDETMAQLQDLKNQHLAKKSEVNDKNHEMEEIRKKLGGANKEMTHLQKEVTAIETKLEQKRSDRHNLLQACKMQDIKLPLSKGTMDDISQEEGSSQGEDSVSGSQRISSIYAREALIEIDYGDLCEDLKDAQAEEEIKQEMNTLQQKLNEQQSVLQRIAAPNMKAMEKLESVRDKFQETSDEFEAARKRAKKAKQAFEQIKKERFDRFNACFESVATNIDEIYKALSRNSSAQAFLGPENPEEPYLDGINYNCVAPGKRFRPMDNLSGGEKTVAALALLFAIHSYKPAPFFVLDEIDAALDNTNIGKVANYIKEQSTCNFQAIVISLKEEFYTKAESLIGVYPEQGDCVISKVLTFDLTKYPDANPNPNEQ

SEQ ID NO: 102 - protein, 749 aa, Homo sapiens
MARKLSVILILTFALSVTNPLHELKAAAFPQTTEKISPNWESGINVDLAISTRQYHLQQLFYRYGENNSLSVEGFRKLLQNIGIDKIKRIHIHHDHDHHSDHEHHSDHERHSDHEHHSDHEHHSDHNHAASGKNKRKALCPDHDSDSSGKDPRNSQGKGAHRPEHASGRRNVKDSVSASEVTSTVYNTVSEGTHFLETIETPRPGKLFPKDVSSSTPPSVTSKSRVSRLAGRKTNESVSEPRKGFMYSRNTNENPQECFNASKLLTSHGMGIQVPLNATEFNYLCPAIINQIDARSCLIHTSEKKAEIPPKTYSLQIAWVGGFIAISIISFLSLLGVILVPLMNRVFFKFLLSFLVALAVGTLSGDAFLHLLPHSHASHHHSHSHEEPAMEMKRGPLFSHLSSQNIEESAYFDSTWKGLTALGGLYFMFLVEHVLTLIKQFKDKKKKNQKKPENDDDVEIKKQLSKYESQLSTNEEKVDTDDRTEGYLRADSQEPSHFDSQQPAVLEEEEVMIAHAHPQEVYNEYVPRGCKNKCHSHFHDTLGQSDDLIHHHHDYHHILHHHHHQNHHPHSHSQRYSREELKDAGVATLAWMVIMGDGLHNFSDGLAIGAAFTEGLSSGLSTSVAVFCHELPHELGDFAVLLKAGMTVKQAVLYNALSAMLAYLGMATGIFIGHYAENVSMWIFALTAGLFMYVALVDMVPEMLHNDASDHGCSRWGYFFLQNAGMLLGFGIMLLISIFEHKIVFRINF

SEQ ID NO: 103 - protein, 519 aa, Homo sapiens
MIPVSLVVVVVGGWTVVYLTDLVLKSSVYFKHSYEDWLENNGLSISPFHIRWQTAVFNRAFYSWGRRKARMLYQWFNFGMVFGVIAMFSSFFLLGKTLMQTLAQMMADSPSSYSSSSSSSSSSSSSSSSSSSSSSSLHNEQVLQVVVPGINLPVNQLTYFFTAVLISGVVHEIGHGIAAIREQVRFNGFGIFLFIIYPGAFVDLFTTHLQLISPVQQLRIFCAGIWHNFVLALLGILALVLLPVILLPFYYTGVGVLITEVAEDSPAIGPRGLFVGDLVTHLQDCPVTNVQDWNECLDTIAYEPQIGYCISASTLQQLSFPVRAYKRLDGSTECCNNHSLTDVCFSYRNNFNKRLHTCLPARKAVEATQVCRTNKDCKKSSSSSFCIIPSLETHTRLIKVKHPPQIDMLYVGHPLHLHYTVSITSFIPRFNFLSIDLPVVVETFVKYLISLSGALAIVNAVPCFALDGQWILNSFLDATLTSVIGDNDVKDLIGFFILLGGSVLLAANVTLGLWMVTAR

SEQ ID NO: 104 - protein, 274 aa, Homo sapiens
MGTDSRAAKALLARARTLHLQTGNLLNWGRLRKKCPSTHSEELHDCIQKTLNEWSSQINPDLVREFPDVLECTVSHAVEKINPDEREEMKVSAKLFIVESNSSSSTRSAVDMACSVLGVAQLDSVIIASPPIEDGVNLSLEHLQPYWEELENLVQSKKIVAIGTSDLDKTQLEQLYQWAQVKPNSNQVNLASCCVMPPDLTAFAKQFDIQLLTHNDPKELLSEASFQEALQESIPDIQAHEWVPLWLLRYSVIVKSRGIIKSKGYILQAKRRGS

SEQ ID NO: 105 - protein, 257 aa, Homo sapiens
MAADGVDERSPLLSASHSGNVTPTAPPYLQESSPRAELPPPYTAIASPDASGIPVINCRVCQSLINLDGKLHQHVVKCTVCNEATPIKNPPTGKKYVRCPCNCLLICKDTSRRIGCPRPNCRRIINLGPVMLISEEQPAQPALPIQPEGTRVVCGHCGNTFLWMELRFNTLAKCPHCKKISSVGSALPRRRCCAYITIGMICIFIGVGLTVGTPDFARRFRATYVSWAIAYLLGLICLIRACYWGAIRVSYPEHSFA

SEQ ID NO: 106 - protein, 619 aa, Homo sapiens
MYGFVNHALELLVIRNYGPEVWEDIKKEAQLDEEGQFLVRIIYDDSKTYDLVAAASKVLNLNAGEILQMFGKMFFVFCQESGYDTILRVLGSNVREFLQNLDALHDHLATIYPGMRAPSFRCTDAEKGKGLILHYYSEREGLQDIVIGIIKTVAQQIHGTEIDMKVIQQRNEECDHTQFLIEEKESKEEDFYEDLDRFEENGTQESRISPYTFCKAFPFHIIFDRDLVVTQCGNAIYRVLPQLQPGNCSLLSVFSLVRPHIDISFHGILSHINTVFVLRSKEGLLDVEKLECEDELTGTEISCLRLKGQMIYLPEADSILFLCSPSVMNLDDLTRRGLYLSDIPLHDATRDLVLLGEQFREEYKLTQELEILTDRLQLTLRALEDEKKKTDTLLYSVLPPSVANELRHKRPVPAKRYDNVTILFSGIVGFNAFCSKHASGEGAMKIVNLLNDLYTRFDTLTDSRKNPFVYKVETVGDKYMTVSGLPEPCIHHARSICHLALDMMEIAGQVQVDGESVQITIGIHTGEVVTGVIGQRMPRYCLFGNTVNLTSRTETTGEKGKINVSEYTYRCLMSPENSDPQFHLEHRGPVSMKGKKEPMQVWFLSRKNTGTEETKQDDD

SEQ ID NO: 107 - protein, 153 aa, Homo sapiens
MADEIDFTTGDAGASSTYPMQCSALRKNGFVVLKGRPCKIVEMSTSKTGKHGHAKVHLVGIDIFTGKKYEDICPSTHNMDVPNIKRNDYQLICIQDGYLSLLTETGEVREDLKLPEGELGKEIEGKYNAGEDVQVSVMCAMSEEYAVAIKPCK

SEQ ID NO: 108 - protein, 253 aa, Homo sapiens
MWPPGSASQPPPSPAAATGLHPAARPVSLQCRLSMCPARSLLLVATLVLLDHLSLARNLPVATPDPGMFPCLHHSQNLLRAVSNMLQKARQTLEFYPCTSEEIDHEDITKDKTSTVEACLPLELTKNESCLNSRETSFITNGSCLASRKTSFMMALCLSSIYEDLKMYQVEFKTMNAKLLMDPKRQIFLDQNMLAVIDELMQALNFNSETVPQKSSLEEPDFYKTKIKLCILLHAFRIRAVTIDRVMSYLNAS

SEQ ID NO: 109 - protein, 518 aa, Homo sapiens
MAENHAQNKAKLISETRRRFEAEYVTDKSDKYDARDVERLQQDDNWVESYLSWRHNIVDETLKMLDESFQWRKEISVNDLNESSIPRWLLEIGVIYLHGYDKEGNKLFWIRVKYHVKDQKTILDKKKLIAFWLERYAKRENGKPVTVMFDLSETGINSIDMDFVRFIINCFKVYYPKYLSKIVIFDMPWLMNAAFKIVKTWLGPEAVSLLKFTSKNEVQDYVSVEYLPPHMGGTDPFKYSYPPLVDDDFQTPLCENGPITSEDETSSKEDIESDGKETLETISNEEQTPLLKKINPTESTSKAEENEKVDSKVKAFKKPLSVFKGPLLHISPAEELYFGSTESGEKKTLIVLTNVTKNIVAFKVRTTAPEKYRVKPSNSSCDPGASVDIVVSPHGGLTVSAQDRFLIMAAEMEQSSGTGPAELTQFWKEVPRNKVMEHRLRCHTVESSKPNTLTLKDNAFNMSDKTSEDICLQLSRLLESNRKLEDQVQRCIWFQQLLLSLTMLLLAFVTSFFYLLYS

SEQ ID NO: 110 - protein, 542 aa, Homo sapiens
MTKSNGEEPKMGGRMERFQQGVRKRTLLAKKKVQNITKEDVKSYLFRNAFVLLTVTAVIVGTILGFTLRPYRMSYREVKYFSFPGELLMRMLQMLVLPLIISSLVTGMAALDSKASGKMGMRAVVYYMTTTIIAVVIGIIIVIIIHPGKGTKENMHREGKIVRVTAADAFLDLIRNMFPPNLVEACFKQFKTNYEKRSFKVPIQANETLVGAVINNVSEAMETLTRITEELVPVPGSVNGVNALGLVVFSMCFGFVIGNMKEQGQALREFFDSLNEAIMRLVAVIMWYAPVGILFLIAGKIVEMEDMGVIGGQLAMYTVTVIVGLLIHAVIVLPLLYFLVTRKNPWVFIGGLLQALITALGTSSSSATLPITFKCLEENNGVDKRVTRFVLPVGATINMDGTALYEALAAIFIAQVNNFELNFGQIITISITATAASIGAAGIPQAGLVTMVIVLTSVGLPTDDITLIIAVDWFLDRLRTTTNVLGDSLGAGIVEHLSRHELKNRDVEMGNSVIEENEMKKPYQLIAQDNETEKPIDSETKM

SEQ ID NO: 111 - protein, 970 aa, Homo sapiens
MATCIGEKIEDFKVGNLLGKGSFAGVYRAESIHSGLEVAIKMIDKKAMYKAGMVQRVQNEVKIHCQLKHPSILELYNYFEDSNYVYLVLEMCHNGEMNRYLKNRVKPFSENEARHFMHQIITGMLYLHSHGILHRDLTLSNLLLTRNMNIKIADFGLATQLKMPHEKHYTLCGTPNYISPEIATRSAHGLESDVWSLGCMFYTLLIGRPPFDTDTVKNTLNKVVLADYEMPTFLSIEAKDLIHQLLRRNPADRLSLSSVLDHPFMSRNSSTKSKDLGTVEDSIDSGHATISTAITASSSTSISGSLFDKRRLLIGQPLPNKMTVFPKNKSSTDFSSSGDGNSFYTQWGNQETSNSGRGRVIQDAEERPHSRYLRRAYSSDRSGTSNRQSQAKTYTMERCHSAEMLSVSKRSGGGENEERYSPTDNNANIFNFFKEKTSSSSGSFERPDNNQALSNHLCPGKTPFPFADPTPQTETVQQWFGNLQINAHLRKTTEYDSISPNRDFQGHPDLQKDTSKNAWTDTKVKKNSDASDNAHSVKQQNTMKYMTALHSKPEIIQQECVFGSDPLSEQSKTRGMEPPWGYQNRTLRSITSPLVAHRLKPIRQKTKKAVVSILDSEEVCVELVKEYASQEYVKEVLQISSDGNTITIYYPNGGRGFPLADRPPSPTDNISRYSFDNLPEKYWRKYQYASRFVQLLRSKSPKITYFTRYAKCILMENSPGADFEVWFYDGVKIHKTEDFIQVIEKTGKSYTLKSESEVNSLKEEIKMYMDHANEGHRICLALESIISEEERKTRSAPFFPIIIGRKPGSTSSPKALSPPPSVDSNYPTRDRASFNRMVMHSDASPTQAPILNPSMVTNEGLGLTTTASGTDISSNSLKDCLPKSAQLLKSVFVKNVGWATQLTSGAVWVQFNDGSQLVVQAGVSSISYTSPNGQTTRYGENEKLPDYIKQKLQCLSSILLMFSNPTPNFH

SEQ ID NO: 112 - protein, 345 aa, Homo sapiens
MSLFGLLLLTSALAGQRQGTQAESNLSSKFQFSSNKEQNGVQDPQHERIITVSTNGSIHSPRFPHTYPRNTVLVWRLVAVEENVWIQLTFDERFGLEDPEDDICKYDFVEVEEPSDGTILGRWCGSGTVPGKQISKGNQIRIRFVSDEYFPSEPGFCIHYNIVMPQFTEAVSPSVLPPSALPLDLLNNAITAFSTLEDLIRYLEPERWQLDLEDLYRPTWQLLGKAFVFGRKSRVVDLNLLTEEVRLYSCTPRNFSVSIREELKRTDTIFWPGCLLVKRCGGNCACCLHNCNECQCVPSKVTKKYHEVLQLRPKTGVRGLHKSLTDVALEHHEECDCVCRGSTGG

SEQ ID NO: 113 - DNA, 309 bp, Homo sapiens
tgctttctttttatctgttttggtaggaataagcttttgttctcttttctgttttgcaagaacttcatcatataatgtttctttcatgaaaagccagaagaagaggaaaattactgtaataactattgaaggaataagaacaataaaatatgctgactcataaaactccatggtacttttgtcaatgtgatcctataaaaccctgtgcggccgggaaaggagaccgggaagacgcggcggcgccggcactacagcccgggccgcccgctccgaggcgccgccgccgccgccgccgccgccgcagtcgct

SEQ ID NO: 114 - DNA, 390 bp, Homo sapiens
  misc_feature (221)..(221): n is a, c, g, or t
  misc_feature (324)..(324): n is a, c, g, or t
gccaagtgataaagccacaaccttgtgtttgctttccctcccaatcccagaactcaggactggagcccatgtggtttgcagttaaaggccaaaagtcctgcacctattttataaaactatgactgtgtttatcactgtgttggggtcggttccatttttgaggttccatctttatgaaaagataacctgtcttctaacctgcttggatggctggtagtcanatgtgaacgaacacctaccgtgtgcctggccatgttctatgttctaggctgcagcaatcaacaagatgggccatacaacacccacccggtgaagttcaagtcnagtagctgttagcttaaggaaagagtattcccttatcccactacaccttaaaatgtattgctgtcc

SEQ ID NO: 115 - DNA, 404 bp, Homo sapiens
tttttttttccaacagcagatagattctttatgttcaagacagcaaattcagatacaaaaacccaccgccatcgtccctccctccctcctgctctgggccagggatgggcctggaaggagagatgggaggtggggaggaggttgcggggttcacagcagactcgtgtcaaatgcggaggtaacaggctccacagggagggggctcctctcaggaggggtgagggcattattgcatttgctggggggaaggacaaccctctcccctgtattccctgcgtcaggaaactaggaaggtcatgacccccaaacagaacccaaggccccagggagacagagggaccagtttggcagctgatggtggaaagtggtggaggcgggggtggccgccaatttggctgatcctc

SEQ ID NO: 116 - DNA, 499 bp, Homo sapiens
ttttttttttttcctggggtgagaatcaaattcctgtgagggggcatttagctcactggagtattcacgaattaaaacttcaatagcccctttaatcatctgatctctcctctttgtttcttcatccaaggcttcttcatcgtcattagtgacagtttctggccttgcattcccattagaagctttcttctttgctttccattcatccagctgtgcctttgtctttgcatcaactttaacgagtagctttttctctccaatttgcaggtcatgtaataatctgagtgcacggagggtagattctggctccttgtactcacagaatccgaaggcttgaagctttccggaagcaccttgtactctcttccagctcaaaaccaaaccacatttagctaagagttgtcttataagcatgtctgaagctttctcggaaatgttgccaacaaaaacagtggtagtaggaccacaattttcatcattttctttagcctttaagcct

SEQ ID NO: 117 - DNA, 493 bp, Homo sapiens
  misc_feature (335)..(335): n is a, c, g, or t
ttttgtggtctaaaataaacttttaattgcacatttgtgtcttgggttatctgtggggtgagaaacctcctcacttccaatcccagctatctgggtacaatctggtgttgtggtctggctgtcggcgaggggtagaggtgggtgcaggactggcccccgagtctgcaccgacctcttcagggcagggagctcagaccatggtagtacttgcactgcttcagggcctcgctgaagccctcacacagggacaggtcactctgagtggtggaacagtccaggaactgcctgatctcataggcgcagggccccatctgcaggggctggggggcagcggnggtgggggcctgctggacagcaggctgggagggctccgagctccccccgctgaaggctccggtcagggcgctgcccatgacgtgtcccacagccgagcccacggctacccctgcggccgtggtcgccatctgagccatgagccccggctggcccgaag

SEQ ID NO: 118 - DNA, 513 bp, Homo sapiens
  misc_feature (484)..(484): n is a, c, g, or t
gtcaaattgtatccgttaagggttttctaacttttgctatcccccccgcgaccaaaaaaagggggggtttataatttaaagaaaaggaaaagaggcgtgggttggtagttgtgtccttaacatttaggaatgacatagcctctggagtctacaaactgaagaaactttcatctgatcagccttggaaatccaaagttaaagagcctatgtgtctcttgaggcgggggttagaggattcaaatttgggatgatgctcattgattcctgaccatagcagtgagaggccattttttgtgcaggaaatgtgcttaggactcagtcttgttttcggattatccaccacagaaaccctgagacacagagcagcttagaagtctctacccaggcgtaaatagagctccctactccagacccatagccagtgagaaggcccatttttttggtgcaggaaatgtgcttagggactcagtccttggttttcgantatccaccacaggaaaccctggagactag

SEQ ID NO: 119 - DNA, 415 bp, Homo sapiens
tgctttctcttctctttcatgatatccttggtgtcctgcagcatcttctccttccaaagatcaaagaagtatgaagggtctgtgtagaatttgagtgcctcttttccatcgtccctgtaaggggtaagattgttgagagggggaggagtatcacaggtattgtatgtttctaagacaggcactgggagagagtttctgtcaaaaagcttctggtcttgaatggtggaacttctgaaggcttttcgggtgttgattccttgcagtgacacttcttcttccttgggatccagctgagtgactttaacctgtagtcggtcgaccctctcagcaagggagcttacccgaggagcaaaggtattttcctgagtagaggactcccgaagaatgtctctgcatatttactcaggctgccgac

SEQ ID NO: 120 - DNA, 426 bp, Homo sapiens
ttatgatttggatgtttttaaattattaatttattttcaaatcatactcagtttgagttcaaatagttcaaaaatcaatataatgcttcaggatgcttccagctattgaaacaacccaattaaaaaatatacaactcacactttattttagttaaattcataatgtaggtaatattaaaaattattataaacatttaataatgctttataatttgctattatagtacaccactacagacacataaaaagttgacttatctaattaaaacattttcccttcctatgtttctaattctgaaaactataaaaatattaaagtcatgttacatatttttcaaaaataaaactgccatatcccattgccaactttacatgaaaaaggtatatgttctggtatattaggaagttaatgatgaaaaatatagg

SEQ ID NO: 121 - DNA, 444 bp, Homo sapiens
tttttttttctcttttaaaaacttttattacgcattgctaaataacattgcatgatgtattgcacacatcatgtggtaaacagcactccacagtaatccatacaatagctcgtacaatgaccatcaaaatagtttgaaaaccgttatagttttcatccgagtgagtgtctttatattcttccatgcaatctgatttcataattaagattactcttccattctacaacaaccaaccgaaaataattttttataaaagcccaaccacaacaaaaggtcattgggacattacgaaaagtcggaaattagactccaaaatatcacaaggtgtccgtcttttgaaagacttgtccctaaaatttgtgtgatctgacacttgggttgcttttaccgccagcagcatgtgacactgtacttactgagaaggaacagtacattgacatatcg

SEQ ID NO: 122 - DNA, 474 bp, Homo sapiens
  misc_feature (419)..(419): n is a, c, g, or t
  misc_feature (431)..(431): n is a, c, g, or t
  misc_feature (446)..(446): n is a, c, g, or t
  misc_feature (467)..(467): n is a, c, g, or t
caattaagggtgtacaaattataataatgcatctctatcttcatactttgaatggcaaacgctatttatgcataaatattttcattttaagtaatatatgaagtgtaaatactcgatatataagtatagattttaaagatatgggactttattttcacataagtcaatagatgtttctctagaacaaaatatttagtaaagctttataaattatattaaaaggaagcggggaacatgtattttttaacatagaacagaagtgacttcattctttttagacatcagaaatgttaaagttgattcccaatatttgttgtacttttttgtagcaaatgttaaaaatcaccgagttaccatgtatagaatgtggactgtcatgttgatatcattggtacagtggataagcccatttttaaccngtatacatttcnccaatttaattaacnggggtgaataatttggtttcnttttaga

SEQ ID NO: 123 - DNA, 474 bp, Homo sapiens; identical to SEQ ID NO: 122
  misc_feature (419)..(419): n is a, c, g, or t
  misc_feature (431)..(431): n is a, c, g, or t
  misc_feature (446)..(446): n is a, c, g, or t
  misc_feature (467)..(467): n is a, c, g, or t
